United States Patent Application Publication US 2022/0008368 A1 - sequence listing, part 24

SEQ ID NO: 2 - DNA, 58617616 bp, Homo sapiens (residues 49,933,530-52,104,552 of 58,617,616)
  modified_base (1)..(60000): a, c, t, g, unknown or other
  modified_base (24448981)..(24498980): a, c, t, g, unknown or other
  modified_base (24552653)..(24552752): a, c, t, g, unknown or other
  modified_base (24891257)..(24891356): a, c, t, g, unknown or other
  modified_base (24895791)..(24895890): a, c, t, g, unknown or other
  modified_base (24898314)..(24904771): a, c, t, g, unknown or other
  modified_base (24908590)..(24908689): a, c, t, g, unknown or other
  modified_base (27190875)..(27240874): a, c, t, g, unknown or other
  modified_base (58607617)..(58617616): a, c, t, g, unknown or other
ctcttgaatttcaaacctggtttcttacaggtggttgtctggggtgggtggagtggcgacaggatagagctgaaggactatgcaaatgaggaagtaagtcagggcgggctttgagaaggggacccatatcctacaggcaaaaagcaggctaggtgaccttgggacactacgctaagggagggaggctaaaggcggccaggtttgcagtgcgggaagatgagcaggccagtgggaggaggggcagggcagggctgtagttggtgactgggtgttcattttagctctaagaaaaaaaatcagtgtttcgtgaaggtgttggagaggggctgtgtctgggtgagggatggcggggtactgatttttttgggaggttatgagcaaaaataaaacgaaacatttcctctggcttgtgcatcttgtctttgagagaagcagctggggagaggcggccttgtaatctcagcactttgagaggctgaggcgggcagatcacctgaggtcaggagttcaggaccagcctgaccaacaaggtgaaaccccatctctactgaaaatacaaaattagctgggtgtggtggcgtgtgcctgtaatcccggcaacttgggaggctgaggcaggagactcgcttgagccaaggagacggaggttgcagtgagccaagattgttctattgcactccagtctgggaaacaagattgaaacgctatctcaaaaaaaaaaaaaaaaaaaaagggggggggaggtggggagggccgggcgtggtgactcacgcctgtaatcccagcactttgggaggctgaggtgggcagatcacgaggtcaggagattgagaccatcctggctaacacggtgaaaccctgtctttactaaaaatatgaaaaattagccgggtgtggtggcgggcgcctgtggtcccagctactcgggaggctgaggcaggagaatcacttcaacctaggaggcagagcttgcagtgagcctagattgcgccactgcactccagcctgggcgacagagcaatactccatctcaaaaaaaaaagaaaaagacagtaataaagataacagggtgggtgcagtggctcacgcctgcaatcccagcactttgggaggctttgccaggtgaattgcttgagcccagaaggtggaaatcagcctggataacataatgagacctcatctctacaaaaaataatttttaagaaaatggctgggtgctgtggcttacgcttgtaatcccagcactttgggaggccaaggtgggtggatcacctgaggtcaggagttcgagaccagcctgactaacatggtgaaaccctgtttctactaaaaatacaaaattagccaggcatggtggtgggcgcctgtaatcccagctacttgggaggctcaggcaggagaatcccctaaacctgggaggcggaggttgcagtgagctgagatcgcaccattgcattccagcctcagcaacaagagtggaactccatctcaaaaaaaaaaaaagaaaaaaaattagtgggtgaggtggtgtgcacctgtagtcctacatacttgggaggctgaggcaggaggatcgcttgaggccagaagttggggaccagccttggcaacatagcaagatgctgtctctacaaaaaaaaaattaggtggggccgggcgccttggctcaacgtctgtaatcccagcactttgggaggccgaggcgggcgaatcatttgaggtcaggagttcaagaccagcctggccagcatggtgaaacctcatctactaaaaatacaaaaaaaattagccaggcatggtggcgcatgcctgtagtcccagctacctgggaggctgaggcaggagaatggcttgaacccaggaggcagaggttgcagtgagctgagatcacaccattacactccagcctgggcaacagagcaaggctctgtctcaaaaaaaaaaaaaaaagaaaagaaaaagaaaagaaagaaaattagctgggcgtggtggcatgaacctgtagtctgtagttccaggtactcaggaggctgaggcggggggattgcttgaacccaaaggttgaggctgcagtgagccatgtttgtgccattgcactccagcctgggtgacaaagcaagaacctgttaaaaaaaaaaaaaaaaagactgggcacagtggctcatgcctgtaatcccagcactttgggaggctgaggtgggtggatcacgaggtcaagcaatggagaccatcctggccaacatggtgaaaccccgtctctatgaaaaatacaaaaattagctgggcatggtggtgcacacttgtggtcccagctactcaggaggctgaggcaggagaattgcttgaactcaggaggcagaggttgcattgagccgagatcgtgccactgcactccagcctgggcaacagagcaagactgtctcaaaaaataataataaataaatacataaataaaagaaaaaagaaaaaaaaagttctccacccagcagcaaagcatctttctttgcaacagtgcggaattttaccggagccttgcgtgtgtggacaacagcgacagtgaagaaatccccccacttttccggcccaggtgtagtggctgacccctgtaatccctacactttgggaggccaaagtgggaggatcgtttgagcccaggagcttgagaacaacctgggcaacatagcacgaccctgtctctacaaaaagttaaaaaaaactaacaacaaaaaagaaatcctcccgcttttttgcattccaggagatggcttactgagaagaaccacccttccgtatatgacttagataagacttgaggatgaaccccttgtctaagacaagggcagacatagaccctccaaattcccatttcgttgtctcgtacatgattaactgaactgttttgtccccagtgatcaattgaaacaaaatgcttgtttaacctaacttactctcctcactgccaggcctctgaatttcagtccatccacagcctcagccagaatacagcccctccttaagcacctctcctgagaagaataaaacattccctggtcgattgtcctgtacaatagcccttgcatcttattttcccacagctggttctttctaaccttgtttactcctccccataaaagaaaaagtctttggctgtgcacatggcctgcgcctgtggtgccagcactttgggaggctgaggaggatcccttgagttctggaattccagagcagcctgggcaacatagcaagaccccatctctacaaaaaaattacaaattagccgtgcatgatggcacgacagtgagctgagattgcaccactgcactgcagcctggcgacagagtgagattctgtctcaaaaaaaaaaaaaaaggaaaaaaacctgcccaattcttgtctcacttgcaaatcttttgcttctccctattgcaatgtcctcacctttatagcaatagtccctttcccaccttaaaaaaatcctttcaaataaagtttctttcctcaaggctgcagtgagccatgattgcgtctgggtgacatagccagactgagtctctaaataaagtctcctcaccaagtatgatttttttaattgaggtgaaattcatataatagaaaaccattttacagggaacatttcatagaacagtggcatttagtacattcgcggttctgtgcaactactgcctctctttcctaatcacttctatcactccaaaagaaaacctcatccccgttaagcagttacttcccacttctgccttctgatgtgttttgtatttgtattcattgaatgcttgcaattccatgaagtggggaaatgagtataagtctgtttttttttttttcagacagagtcttactctgtggcccaggctggagtgtagtggcgcgatcttggctcactgcaacctctgtctcccgagttcaagcgattctccggcctcagcctcctgagtagctgggaccacaggtgcacaccaccaagtccagataatttttgtatttttagtagagacggggtttcaccatgttggccaggctggtctcgactcctgacctcacgtgatccgcccacctcagccttccaaactgctgggactataggtgtgacccaccgcgccgggcgcgaaatgatttcttactgtgagtcatggtcagaaaagtttgaaagccactggtaggctccccccagcttgacatactgattttcagacaatagccggtttgcagaccccacgcttccaaaaccaatcatttctggcctctgggcggagtttgtcttagcaggagtctgccgccaggtggcgcgcgtaccccgccgggagtgggttttgctccatcccagactcagaccgtccaagccggtgatttccttctggtcggtttacggggactagaagccctgacttcgaatacagttcacaaagcagacccctgcagggggttttaggcggctaagaagggaattggctctcctaagactctctttctccagagagctcattaaatgcctcccgcgccagaaggggtccccgcccccggagctcgcatcccagtggggaggacacacacaaaccccattcgcgatcccgtcagtgcagggaggctccggcctggggccgaagagccgagtctctctggtgcctgacagcacgggatagagccccgcccggccacctgctggctgtgtgaccttgggaatagtgcttggcctcgctgtgccttggttccctccactataaaatggcagtgataacagcagccacttcatagggttccgggcattgcgtaagttaatacatgcaaagcgctcagaagggatggtgcatgtttgtcgaacccgttgttaaaaattcccattttaggctgggcgcagtcactcacacctgtaatcccagcacttcgggaggccgaggcgggcggatcacctaaggtcaggagttcgagaccagcctggccaacatggtgaaaccccgtctctactaaaaatacaaaaattagccaggcgtggtggcatgcgcctgtaatcccagctattcaggaggctgaggcaggagaatcgcttgaacccgggaggcggaggttgcagtgagatgagatcacaccactgcactccagcctgggtgacagagtgagaccctgtctcaaaaaaaatttcttattttacagaagagaaaaccaaggacaagaacagggtagtgaatcaccaagcccacattttttttttttttttctgcaggaagatctccaagttgagtccagtggtctgactcccagcccagatggccttccctcggccttgtgcttgcttgcttggggtggaagtggagccagctcccttgggatagctgctcaagccccgagtgaaatcctcccgcagaggacattggccccctgttggcatcagtgctgggactcgaatgaaactctgtttctgcctgggtcaggagaatagctagattaaataaataagtcactgtaatgtcacagggtgaacccccaaattgggattcagcctgggaggccacatgagttgttggcttcgtgcagaaaagaattcaagagtgagccagcagagtaaagtgaaagcaagtgaaggaggccgggcgcggtggctcacgcctgtaatcccagcactttgggaggccaaggtgggaggatcacttgagtccaggatttcgagaccatcttgggcaacatggcgaaaccctgtctctacaaacaatacaaaaattagctgggtgtggtggtgtatgcctgtaatcccagctacttgggaggctgaagtaggagaatcacttgaacccagggggcagaggttgcagtgaaccaagattgtgccattgcatgctagcctgggtgacagagcaagactctgtcttaacaaaaataaaaaataaaaaaaaaattaaggctgggcgcagtggctcacgcctgtaatcccagcactttgggaggctgaggtgggcggatcacgaggtcaggagattgagaccatccttgctaacatggtgaaactgtgtctctactaaaattaaaaaaaaaaaaaagttagctgggtgtgggggcaggcgcctgtactcctagctactcgagaggcggaggcaggagaatggtgtgaacctgggaggcggagcttgcagtgggccgagattgcaccactgcactccagcctgggccagagtgagactctgtctcaaaaaaaaaaaaaaaaaaatataggctaaaataaacaaaggactgccaccacggccacggccactaccgacacctcaccaggggccaaagcatgtatttcccagagcctgagagctgcatgcctggggctgctgccattgacagcagtcctgcccctgcaccagcagcagtgccatgcacatttgtacatgccctgaggacaggatctccttgccgacaactgccactaccactaacacccaagcatgccacatagcagccaagggattgcctcagcctgttcaccacctgcacccacgtgcaccaccacagggcctgaggacgggcccacccagtcaggcactgctccccacaatgcccaagcatgctgcctagggccctggcattgccctgcccatctgccaccactggtatctatatactcctcctgggggtctgaggatgggtctacccagcctgctgccaccatcaccactggcacacactgacatgcatcacccacctagcccatctcagccactggtaacaccagtgtttgctgcctgggaagttaaggattgtcccaccattgccactgccaccatcatgccatgcatgcagcccagggacccaaggacccactcatcatccttgctgactgctgcccctgctggcaccaaagtgagccacgtggaggttcatgaattggcccatctggacctgttaacaccagtacttgtgtatacccccaaaggccaaaggataggtatgctcagcctgcctctgtcaccactggaggccaaggattgacccacctggcatcccatccccagcaaagtctcaatacagcctccagtgacaaccacatcctaagccactgaggaagtcagacactactaatgctgtttgtagctgaaaaaatcatagagactacatgactgcacgctagaatcaaagctgaagagcattacccagtgaacaccacagatacgatgtcttcatgaaaaagtcttccgttatgaaagccaatccaaaaaatgggaagaagtgactgttacaccagacgcgcaaaaatcaatgtagggacataagagacttgaaaaagcaagaaaatatgaaacctccaaaggagtgtgataatgctcacacaacaaattccaatgaaaagaaatttataaagtgccagtgtgggcggcaagccacccaggtgccgaggcaagagaccgagggcacgagctgttccagtatagtaaaatatataaaacaacaagagttatactagatctagatcacagacatgattacatatgaatatcattaatcattagtttgtagcaattactccttattccaatattataataatcctcgctctacaatcataacctaggaaaaaccaggccatacagagataggagctgaggggacatagtgtgaagtgaccagaagacaagagtgcgagccttctgttatgcccggacagggccattagaggcctccttggtctagcggtaacgccagcgtctgggaacacgcctgttgctaagcggacagtggtctagtggtagcctcagtgtcaaggaaaaccacccgctacttagcggaccaggaaagggagtctctctttccccgggggagtttagagaagactctactcctccacctcttgtggagggcctgacatcagtcaggctcgcctgcagttatccggaggcctaaccatctccctgtgatgctgtgcttcagctcctagtccaccttcatgttccatcctgtacacctggctctgccttctagatagcaatagcaaaattagtgaaagtactaaaagtctgatatgcagaaataatggcataagctgtctctctctctttctcctctctctctctgccttggctgccaggcagggaagggccccctgtccagtggacacgtgacccatgtgaccttacctatcactggagatgactcacactctttaccctgccccttttgctttgtatccaataaataacagcacagccagacattcggggccactacgggtctccacgtcttggtggtagtggtcccccgggcccagctgtcttttttttaatctttgtcttgtgtctttatttctacaatctcttgtctccgcacacggggagaaaaacccactgaccctgtggggctagtccctacagccagaaaaaggattcaaaatattgctattaaagaatttcagtgaggtctgggcatggtggctcatgcctgtaatcccagcactttgggaggccgaggcgggtggatcatctaaagtcaggagttcaacaccagcctggttaacatagcgaaaccctgtctctactaaaaatacaaaacttagccgggcatagtggtgggcgccagtaatcccagctacttaggaagctgaggcaggggaatcacttgaacccaggaggcggaggttgcagtaagccgagattgtgccactgctctccagcctgagtaacagagtgagactctgtctcaaaaaacaaacaaacagcctgggcgtggcgactcatgcctgtaatcccagcactttgggaggccgaggtgggcggatcacgaggtcaggaggtcgagaccatcctggctaaaaatacaaaaaaattagctgggcgtgctggcgggcacctgtagtcccagctactcaggaggctgaggcaggagaatggcatgaacccgggaggcggagcttgcagtgagccaagatcgtgccactgcactccagcctgggtgatggagcaagactgtctcaaaaaacaaaacaaaacaaaaaaaaacccaaaaccgaaaaactttcaagtctctaggcatagaaggaacatatctcaacacaataaaggccatctatgacaaactcacaacgaacgttatactgaatggggaaaagctgaaaaccttttctcaaagaactagaataagacaaggaagtctacctctaccactcctattaaacatagtaccagaagccctagccagaacaatcagacaagataatgaaacaaaaggtatccaaattggaaaacaggaagtcaaatagtccttatttgcagattgcatgatcttatacttagaaaaacttcatcagaaaacttttaggtctgataaaccaattgtggcaggatacaaaatcaacatacaaaaatcagtagcaaacctatacaccaataatgaactggctgaaaaagaaatcaagaaagcaatcccatttacaatagctacaaaaaaaaaaaaaagaaaaagaagaagaaacttaggaataaatttaactaaggaaatgaaagactttgacaagaaaaactacaaaacactgatgaaagaagctgaagatgcaaacgaatggaaaggcatcttgtactcatggattggaagaatattgttaagataacattactacccagagcaacctatggattgaatgcaatccctagcaagaaaccaatgacaatttaggaaaagcaatcctaaaattcgtatggaaccaaaaaagcttgaataaccagagcaatcctgggcaaaaagaacaaagctggaggcaccacactacttgacttcagaatgtattataaagctataataaccacaacagcatggtgttgctataaaaacagacacatagaccaggggaacagaacagagaacccagaaataaacccacatatttacagccaactgattttcaacgaaggtgccaagaacttacattgggaaaaagacatcctcttcaatagatggtgctgagaaaactgggtatccatatgcagaagaatgaaattagacccccatctctcaccatatacaaaaaccgactcaaaatggaatagaaacttaagcgtgagacctgaaagtataaaactactaaaatgaaacataggaaaaattatccaagacattggtctaggcaaagattttatggttaagacttcaaaagaacaggcaacaaaaacaaaaatagacagatgggactacattaaaccaaaagcttcttcgcagaaaaggaaacagccaatggaatgaacagacagtatgttgaatgggagacaatacttgcaaattattcatctgaccaaggactaatatccagaatatacaaggaatgcaaacaactcaacagcaaaagaacaaccacattaaaaagcaggcaaaggacatgaatagatatttctaaaaataaaacataatggtcgggcatggtggttcatgcctgtaatcccagcactttgggaggccgaggcaggcggatcacctgaggtcaggagttcgagaccagcctggccaacatggtgaaaccctgtctctactaaaaatatatattaaaaaattagctgggcatggtggtgcatgcctgtagtcctagctacccagggggtcaaggcaggagactcgcttgaacctgggaggtggaggttgcagtgtgccgagatcacaccattgcactccagcctgggtgacagagtgagactccatcttaaacaaacaaaaaaagaagacatacaaatggccaacaggaatatgaaaaaatattctaatccctaatcatcggagaaatgcaaataaaaaccacagtgagatatcatcctaccctggttagaatggctattataaaaaagacaaaaaataacatgcctggaaagattccatcccagaaaagtgaactcttcttttttttttttttttttgagacagagttcactcttgttgcccaggctggagtgcaatggcaccatcttggctcaccgcaaccttcgcctcccgggttcaagcgcttctcctgcctcagcctcctgagtagctgggattacaggcatgcgccaccacgcccggctaattttgtattttcagtagagacagggtttctccatattggtcaggctggtctcaaactcctgacctcaggtgatctgcctgcctcagcctcccaaagggctgggattacaggcgtgagccaccgcgaccagccagaaaagggaactcttctacactgttggtggaaatgcaaattagtgtagtcattatgagaagagtatggcgatttcttcaaaaactaaacctagaactaccatatgagtcagcaatcccactactgggtatgtatccaaaagaaaggaagtcaatatatcaaaaggatacctgcacctccatgtagattacaccactattcataacagtaaagatacggaatcaacctaaatgtctatcaatttatctatttcttttataagaaaatcctctcaggctgggtgcggtggctcatgcctgtaatcccagcactttgggaggcccaggcgggtggatcacgaggtcaggagattgagaccatcctggctaacatggtgaaaccccgtctctactaaagatataaaaaattagccgggcgtggtggcgggcgcctgtagtcccagctactagggaggctgaggcaggagaatggcgtgaacccgggaggcggagcttgcagtgagccgagatcgcaccactgcactccagcctgggcgacagagcgagactctgtctcaaaaaaaaaaaaaaaaaatctttatcctcattgtttccacattgagtaggctgaggaggaagaggaagaggagagactcattttgctgtctcaggggtggcagaagaggaagaaaatctgtgtataacccagtgtaaacttgtgctgttcaaaggtcagctgtacacacacatagacacacaaaacatgcataatacagttgaatactactcagccataagataaagaaatcctgccatttgcaacaacagagttaactctaaatcagacgtagacaaataccgtgctatctcacggatgcgtggaatccacagaagtcaaactgtcactagagagttgtccaggttcttggcgtgttgaacaaagaattgaacaaaatgcacaaatcaagtaacaaaagaaaatgcaaggagggaaaaaccagcagaagaatggagtaacaaaagcacagattttttttaagttctggggtacatgtgcaggacgtgcagctttgttacataggtaaacgtgtgccatggtggtttgctgcacctatcaacccatcacctaggtattaagcccagcatgcattagctgtttttcctaatcccgtccctcccccggccccttgacaggccccagtgtgggtttttccccttcctgtgtccatgtgttctcattgttcagctcctacttataagtgagaacatgtggtgtttggctttctgttcctgtgttagtttgctgaggataatggcttccggctccatccatgtccctgcaaaggacatgatcatccttttttctggctgcatagtattccatggtgtatatgcaccattttctttttctttttcttttttttttttttttttttgagacagagtcttactctgttgcccaggctggagtgcagtggcgtaatcttggcccactgcaacgtctgccttccgggttcaagtgattctcctgcctcagcctcccgagtagctgggactacaggcacccgccaccacaccctgcttttttgtatttttagtagagacggggtctcaccatgttggccaggataatctccatctcttgacctcgtgatccacctgcctcggcctcccaaagttctgggattacaggcgtgagccactgcacccagcccaccacattttctttatccagtctatcattgatgggcatttgggttgattccaggtctttgctattgtgaatagaaaagcacagatttattgaagacaattcagagtgggagcgggatcgagccagcagctcaagagcctccccaattaaggtttgtaataagctagaaggaacccggcaacacccctagacgcccttcagaggcttccaattggttagatgctatgaaggattggctcaggaccaatcagtggccgtagtggagacccggcccgcagtcaatcagaggctgatgtggcttgttatcaccagggaagacgtgacctgtaagccacacctgctgctctcctgcctgtaggaactggctgcacctgctgaacccctgttcctctaatcccctattctcctgccacaaaactcatggaaacaaagtagaattagaaccgtggttgctgggggctaggaggggagaaaaacagacagatgtcggtcaaagggtagaaacttgcatttacaagatggggtcagcccggcatggtggctcacacctgtaatcttagcacttttggaggctgaggcgggaggactgcttgaggccaggactttgagaccagcctgggcaacatagtgagatctcgtttctttcttttcttttctttttttgagacagagttttgcttttggcgtccaggctggagtgcaatggcgcgatctcagctcactgcagcctcggccccccgggtttaagtatttctcctgcctcagcctccctagtagctgggattataggcacccactaccaggccctgctaatttttgtatttttagtagtgatggcatgattacaggcgtgaggcaccgcaccctgccgtgagatcccgtttctacaaaataaataaataaataaataattacctgggtgtgatggcatgtgcctgtggttctagctacttaggaggctttagtgggaggatcacttgagcccaggagattgaggctgcagtgagctgcagtgagctgcagtgccactgcactccagcctgggtagcagagcaagaccctgtctcaacaaccaaccaaccaacaatcagttctgggagtctactgtacagcatggtgactacagttaacaatactgtatcgcatacttgaaatttgttaacagagtacatcttaagtgtttctgccacacacacacccaaagagaactgtggaggtggctgggcatggtggctcatgcctgtaatcccagcactttgagaggccgaaaggggcagatcacctgaggtcaggagttcgagattagcctggccaacatggtgaaatcctgactctactagaaatacaaaaattagccaggcatgctggcacgcgactgtaatcccagctactcgagaggctgaggcaggagaatcgcttgaaacccgggaggtggaggttgcagtgagctgagatcgtgccattgcactccagcctgggtgacggagcgagacttggtcttaaaaaaaaaaaaaaaaaaggagagagacctatgaaggtgatggaacaggtagtgctcatttcagaatgtatacaaatatcaaaacatcatgatgttcatggtaaatatactcaatttttatctttcagttatgcctcaaaaatctggaaaaagaaaaaaaaaaccctttagagtggaggagaaggaagcaagtggggcacagggagaaacgagctgagacacagaccaaccccagcgtcagctgagacttcagagacttctgaggctggaactgccctgcagaggccaccatcagggtcaggatggtcagaactttatacctagtgggctcccctaagaaaaagtgtgactcaggcgagggactcgctgcacacacgcctctgtgggatactttatttatttatttttgagatagagcctcactctgttgcccaggctggagtgcagtggtgcaatctcggctcactgcaacctctgcctcttgggttcaagcgattctcctgcctcagcctcctgagtagctcagattacaggtgcgcaccaccatgcccagctaattttcttgtatttttagtagagatggggtttcaccatgttggccaagatggcctcaatctcctgatctcgtgatccacctgccttggcctcccaaagtgctgggattacaggtgtgagctactgtgcccggccttatttatttatttttgagacagagcctcactctgttgcccaggctggggtgcagtggtgcaatctcagctcgctgcaacctctgcctcctgagttcaagtgattctcgtgcctcagcctcctgagtagctgggtctacaggtgtgcaccactacatctggctaatttttgtatttttggtagagatggggtttcaccatgttggccaggctggtcttgaactcctgacctcatgtgatctgcctgccttggcctcccaaagtgctgggattacaggtgtgagccactgcacccagcctggatgctttattttaatgatttcctttctgtcccactacagccctgtgatttaggcttattgtgtctattttactgaggagtaagatgacttactcaaactcaggctttatttattcatttatttatttagaaacagagtctcactctgttgcccaggctggagtgcagtgggacgatctcggctcactgcaacctccacctcccgggttcaaccaattctctgcctagtctcccgagtagctgggattttaggcgcccgccaccatgcccggctaatttttgtatttttagtagagatggggtttcaccatcttgcccaggctggtcttgaactcctgacttgtgatccacccacttcagcctcccaaagtgttgagattacaggcgtgagccaccatgcccagccttttttttttttttaaatgttcaaatgggaaccacttggacttggtcctctcactctccctcttctgaaggaagagcatggtcatcaacggggaatggcagttgcagcaaacaactccaggagctggcttctcgttctggagagcaccctgtgcctcctctgcctggtttcctgtgctttacacatccagagaagcttctgtagtaatgaaccatagacacgatgcctcaaagtgtcatcttcaaactcgctctgaattgaaagtataatcttcagccagctgtggtggctcacgtctgtaatcccagcactttgggaggcagaggcgggcagattgcttgagcccaggagtctgagaccagccagggaaacatggcaaaaccctgtctctactaaaaatataacaatgagcctggcatggtggctcacaattgtagtcccagctacttgggaggctgaaatgggaggctcacttcaacctggcaggttgaggctacagtgagctgagattgcaccactggactctggcctggaggacagagtcagaccctgtctcaaaaaaagtataatcttcaaactcaagctcttcattggggatggggctgaaatctgagtccagttctggccgtcacaccagtgcgactcccacacacttgctggtgtcctgttgccatggagacctcttcactttggaaccatccctgacatctccctctccaattgaagcccaaagcctgggcccctcaggggctgtcctgtgtggatcttgatctccgagtactcggtggtgctgggggcctcctggtccgcaggctcccagagcctcaggccctggaagctgagggaggcatagtggagctcctgctcttcccccttccccggggtgtaggtggctgcacctgggggcgggtggtcttgggagctgcctgccgagcattcatgctggtgaccctgaatgcaggggagaaagggggtcaaattagggtcatgggggctaagcgagagcaaggaggatgcacaagaggatctggaaattgagtatttcctgtttcacctactcattccacaaaggtcagctgggccctcattcattcactcattcattcattcactcattcagcaaatatttgagaacaataacatctagctcttggtaattcactgccagactcataaaatcctcaccacaatccagactcataaaatcctcaccacaatccactggggagacactattgtctccatgatcagatggagaaatgaaggctgagtaaataccccaaacccgcacatctaagtagcggtcaggccaggattcacgtccaggtttctctgactccagtgcccgctgccttatggaacagctcccctgtgccagcccctggatattcccgggggaactagggagacaccacccctgatctcaggcagcttgcagtatggaagaagaagtagacacattaaagctatagtcaatgaagttactatctaattgcaaattataagtggatgcccaggaaggaggaggtgtgagaaagacagggatttgctcggacctggactgacctcaaagaccttggaagatctactcggacacaattgtgaaactgagctaggagctcaagaaagaaaggttactggaagtaaaggattccccttgcccagagaaagcttcaaccgtttgtgcccaggtgctgggaaggaacctctaatgtagggccttggaatatcctgctggtaggagcatccctgttgacctgggaccacaagccaggccacatagtttacgccagcactgggacttacggcggggcctacgtagcatcagtttggctctgcaggggctgaggaactgaagtcagtggcaagtcccccatgcctgcgtgacccacccccagtgaaccctggacccaggtttggtggagcttcccaggtgagcggtgccctgatgctccgtgcatctgtcacacttccttgctgggagaattgggtgctgtccccatggctcccctgggaaaggccaccggaagctgtgggtttggtatctcctggacctgccctgagcacctcttcctgtccatgattttcatctgtatcggtcactataaaccatcaccacgaggatcacagctctcagtgagtcctgcgagtcctagggggttatccaacctcagagtggtcgtggggaccccacaactgtggttggtgtcagaagtgaggatggggacccttagctttgtagtagacaatagtcatctgaggaaaggactctctggcatcctgtgttgaggaggagagataggagggagggcaaaggagtcggggatgcaggaggaaatgaggagtgggaggtggagggtccactggatctgagcacaggcagagtatggacaggcctggggggcccttggttctgggaggggatgtagggagcagtggggagggtgcctcccagatcatgggacttgggactgcattgatggggacccaggagcaaaaccctatttggggcacaatgattctgcaagtcaccaagaggactacccatggccatcaaggaaaggggaacaggcagggccccagcagacagaggctgggctctcacctgggagatgggtcccagggtggagggcacgtcctgctcagctgctgccctcttgcgagcttccttcctgcagatcttcaccctgagggaggaggcagtgcccttcagcctccaggctggtccagagcctggggaaactgctacccacatggcttagcagaggctggaaggctgcagagcccagtggggtggggacatatccacggggtgacttccatagtgagaactggggaccctcatagatggcccagatcagggctctggagcagacccctgctctgatcctcttgcccaaggcctagttctcacacccactgccccatctagattcctgcagctgggactgtctgggattctagaaccctcacccttcccacaccctgcattgcctgccctccgatgcttacctgaagacgacaaggcaggaacagaaagcgagcagggcagcgacgccagctcccagggcagcccccaggccaagtcctcccccatgctccagcttccctgcatgggagcagggtttggggtggtgccctcctggccctgagaccctcctgccccttcctcccacagacctagagctctcggattcttcatccccaactgaggcagaaatttaaaaataaatatgcattcattcactccaagaaaagtaacaggcaaggaaagggttaaaaaaagaacaacttttcctctgcttagcaaggctcacttcaaggacagttataagataatactgtttaaaaagccaaggccaaaggaataggctccagacacacccccttccagagcaaggttgaaggaaaacaagaaagaaaaacaaattcctttactgttactcctttccctggcttcttaagcataactatgttttacaaatgtctgtatttagccagttctttttttttccttttgatacagctacaaggccaccagctatgcaaggccacaagttatgctatactataaattatgtcacctatcctaaaattaactgcctctgttttacttttgtaagtctgctcataaaaacctcgctctgtctttgtttcatgctcagctttttagatgcgagtccactgagccggtttgcacctaaaataaacaatcctcctgttctccgtatcggtctcaccagtcctcagtttcccgcagcatttttggcgaccacgaagggaccagagacggtaggtttactgcctcctttgcctctgggggctggagccccgggcctcaggagacctgtgaccccaggtgccactgggtgaacttcagcctggaggagaaatcagctctcccctgagccggcgcccctacccagcagcacaacaaaacctgaaaggagctacagaatgatttcagaaacagtgtacgtcaggaaccacagtaaccttttggggaccaaggcaggacccatcccatagggatggaaggggaggctgatcacttcttgcggggtgcctaacagtccgacccagaggggttgggggcagcgagagtggctcgtcgatttggatgaaactcacaccccaaccatcacaggatgtgagaatggtttgctaagtcgattaggaaaaggaaactggaggtggcgagagtggcttaccaccctaattaggaacttaggaactgggagtggggaagtgtgtaacagtgtgtaaatgaagaagccttattaggctgatcagccacaaaatgggaagtcacaattctcttagtgtggactgggtgctccgagcaaagtgtggggccaactaagactagtggtgatctgcgtatggctaataggagctgccctacagctcagagttgtagcaggaataaggaactctccaaagccaagtagcttctgaaaactcccgtaataggagatggtatagttggccgaaactagaggaagagtgagtgtgctgggccgtaaaggaaggaatagaaggaaagtccatcaaaacttactccattgaagtgcatgttacaaaactttaagaaaggttttgcaggggattataaagttaagctaaccccccaaaggttgagaactctctttgaattagaatgactttcttttgatgttggatggctgaccgaagaaactgtagactaggaaacaattgggcatgtattaaagatggtgataggggtctgaggacagcctgagtatcccgatcaatttccttatattgattcatggttaaatacagcacagacaagactaacctggatcaagccctgtttagcagcttattgcaaaacacttgtagcccgagccaaaaataaaagtaagagcagcttcaccgactgacacgaagttaaaagaaaaaccccagaaagagcaagagaagccagttttgcaacagctgccagaggaaacagaaattcctcctccatatgtcccagcctacccccctttactgaggccaacagccctccaggaaccaaattcaggagctagcatgccctgagtctgaccccgaagggaaggactggagcctcaaaaggccagggaaggaagtcaaaatagtcaagcaggctgtctcagatctggccgtgcttgagctatgcaaatgcctgctcgagctatgcaaatgcctgtcagggagatgtgaggacccacttattgtaataaccaaggccaggttcggaggtggggggcaacgcaccttcatctatcagccctttctgactactgagctactgatctactgaactggaaacaccatactccctcctacatggagaagcctcaagctcttatagatctgacgcaatccgtctttctgacacacagtccaacctggccagattgcaggcagcttttcctaacgttatttaacactaaaaagcgcaggagagtaacataggcagctctcccctggctaaaaccccatgcaccagcagatgcagtgaatgctcaggcatacactcaaggtcagttctcataccaagatcccaactggaacccagaggatgcaactcagcttcagcatttgcaaaggtaccaagagacacttctgcaagggataaaagctggtggaaagaaagcaattaatatacgaaaaatttcaaaagtgcttcagagagctgacgagagcccaagtcagttttataaaaaactttgtgaagcattccggccttacaccctatttgaccctgaggctgctgaaaatcagcgcatggtaaacacagcatttgtagggcaagcccagggtgacgtcaagcggcagctgcaggcatgaatgccacccagcttataaaagtgaccaccaagatgtacatgaaccatgaccagagaacaaaacgggaaagagcgaaagcaacaagcgaggcaccaagcagctaggcacaccaagggtttagtccctctcctcagcctggctctatctggaaaaagagcggggcggggactggccccagaaaaaaagccaaaaaaaaaaaaaaaaagaaaggcataattcttacaacttgcggcaggcatctaccaagcctctgggcctataacggcccaggggtggactacggctgtgcagatcctacctagcccaaaaaagtaagtgtgaaaaaggaaaaaagaaaaatcagaaagaaacagtaaagatagatggcagtgcgtgcgtgcacaggggcggggcccacgccgtagcccagtcccactggccagctgtaggagcaggataactcaggaaggaaaaaggaagcagaacataggcttaaaaaaaaaggccaatctgttggcagcagccctcataaaaagaaaaattagcaggccgggcatggcggctcacacctgtaatcccagcactttgggaggccgaggtggacagatcacagggtcaggagattgagaccatcctggctaacactgtgaaaccctgtctctagtaaaaatacaaaaaaattagccgggcttggtggcgggcgcctgtagtcccagctactcgggaggctgaggcaggagaatggcgtgaacctgggagttggagcttgcagtgagcagagatggcgccactgcactccagccagggcaacagagcgagactccgtctcaaaaaaaaaaaaaaaaagaacttgtacttatggccgggcgcagtggctcacacctgtaatcctgttaccagagcccactcctttagcagaaaacctgtttgctcggctgcctaaaaacattgtcggcagcctaggcatttcctcatactatgtttgcggagggactaacacggaagaccaatggccttggaaagcaaaaaagttaatgccacaaaataatttaactgactcttctcccgaaccgacgcccacaagttcaagcgtctggctcttaaaaacttctattatcaggaaatactgtgttgctcgctggggaaaagtttttacaaacccagtaaaagaactaaactgcttaggacagcaatatgacgataaaacactaagaaacactttgtggcggggcaaagatgaatgcaaatgacctcatccaaatccgttccctgtttctcttctttaaatcacacctactatcagccgaaagctccaaatacttggcaagcacctcctagtctttgttggatctgtaggccatgggcatatcaacagttgccagctaaatggacaggggcctgtgtgcttgaaacaattagaccgtctttcttcctattcccactgcaacagggagaaactttaaggtatcctgtctataataaagttaaaaaaaatgcaaacacacacacaaaaataaaaattaaaaaaattgaaaagacacaaattaaccccctgaaaaaataattcaatagtataggccagctacctgggcacaaaatgggtcatggggataccacactcctatttacatgcttaaccgcatcataaggttgcaggcagtacttgaaatcatcactaataaaacagcaaatgcattagatttactggcccagcaacccacaaaaatgaagaatgttatctatcagaacaggttagctttggactactcctagcccagaaaaaaaaaaatgtaaaaagttcaatctaactaactgctgcctaaaaatcgctgacaatgaaaaggcaattataaaaataactgcaaaaataaaaaaattagcccatgttccagttcaaacttggaaagggtggtctccagattctctctttaaggactggttttcattttgcagagggttcaagactttaataaaagtggttctggccatactaggaagttgccgaatactcccttgtctcttagctctccttgttggaagcattcaatcaactataaaggcaatagcagctaggcaaactaccactcagctaacggctctgcataaatatcaacctttgtctaaagaaaaaaagtgtctcttcatgcagaattaagtaatagtaatgccttctattaaacttcttttataaaaaacatcaaaagggggaaactgaggcaaaaatttaaaaataaatatgcattcattcactcccaaaaaagtaacaggcaaggcaagggttaaaaaaaaaacaaaaaaaacccaagtctttctatgcctagcaagctcacttcaaggacaggtataaaataacactgtttaaaaagccaaggccaaaggaatgggctccagacacaccccttccagagcaaggttaaagaaaaaaaaaaaaagacaaattcttttactgttactcctttccctggcttcttaagcacaattatgtttcacaaatgtctgtatttaaccagttcttgtttttcttttgacacagctacaaggccacaagttatgcactatataattaaccgcttttgttttacttttgtaagtccgcttataaacacactgctttagccgggcgcggtggcacacgcctgtaatcccagcactttgggaggtccaggtgcgtgaatcacaaggtcaggagttcgagaccagcctggccaacatagtgaaactaaaaatacaaaaaaattagctgggcgtggtggcgcatgcctgtaatcccagctactcaggtggctgaggcaggagaattgcttgaatccgggaggcagaggttgcagtgagccgagatcgagccactgcactccagccttgctgacagagcgagactccatctcaaaaaaaaaaccaaaaaacaaaaaaaaccccttctttgtctttatttaatgctcagcttttgaaatgtaaatccactaagctggaacttaccttaaataaacaatcctcctgttctccatattgctctctccgttcctcagtttcccgcaacaactaccagccacagagcagggactttgtccccatcccttcccaccacgcccacaccctctccccacaaccttgaaccttcatctttctaggatcctgtctcctttctccctgaacctcagccccccacagtcccctcacctggtagcagctggaagacagagccactctgggccccgtggacgttccaggccttacagcggagcctgaggccggagctgagccctccatggaggctcagggagctgttggcccagggcccggctgagctgggggtgacctcgaaggagccctgactgctgttcccctccagcagctcctccccaagccaccagcgcagagagggggccgggctggcctgggaggagcagctgcagtgcagaccctcagcctcccaggagcaggaggggcccagcagctgtggagggtctgtggggagggaggacaggactcagcaggggccccttcctgggacccaggtgtcccctttcccccactcacagtgcacggagaggctgagagagacgtgctgggagcccagagggtgctgagcgtggcaggtgaactctccttcgtgctccatttgaatgggtggcagctccaggaccccggggtctgagggctgggaggggcccacggtctgtccccaccgggtccagctcagcctggctggggggctgctgtgggtgacacagaccaggcgcaggctttggccctccaggaccgggagggatgtgccgttcccgaggttttccaggactagggaaggaagaggcagaatcgacgtgcagctcagggctcagggaccctcctgtgtggggaccctccagactcctgggcccccagtttggcactgagaggccctggctcctctgtctcctttcctacctgtcctgtttgcttgggaaaccatcactctcaggttctctggaggatctgaaatggagacaggggaccggctctagacagaccaggggcttccctctgggtaaagggaactatcctggacactgaggtgggggaagtgggtgggatagaagggcagggcagaatcacccactgagtcccagacacaaactgcatgagggtctacacaggtaagaaggtcagtccccgaggcctggggttcaagaccccctcagctctgggaccctgagcccagcccctgtatccctctgccctcccaatggactccaggcccctgctaggcacactcacactgcacagagaggtccagggcttgctgctgggagccaagcctgttctccgctcggcaggtgtagcgccctgaatccccggcccttaccccacgcagctccagccccagggttctggggccccaggggtgggacgaggagaggactctgtcctgcaggacccagctcagcgtggcagggggctggctgtcagcagcacagaggagccgcaggaactggcctttctgaacttccagatatatgacgtttccctggagttccagggctgaagacagggaaagagagagggtgggggtggagagagagaatgggtgggagggggggctgcaaagaggaccacatcccctcacccccctgaagccttttcatccctaaagaggactggcccagccccagcccgaaggccctcagtacctgacgtgttgtcatgtgaaatgctgataataaggtctttgggggcatctgcaacaagattgtgagctggcttcagggagggacaatttgttcctcacacctggaaaaaactccctcagggaaaagaaagtgggaacatcccaggatggacaagtgacaaccagctccagggctcacacatgtggacagaggatcagacgccattcccatccccctcccagggctgagccggcatcctgggaccccacagcttcctctccctggatgctcctgagctgggagccactcactgtcccgctgggctcctccacctccccacccaccggggctgtctgcacgccccaccctcccaggccacactcacaggccacacggagtcggacggtcctctgtgcgctcacaccctttctggagaagtccacatggcaggtgaggtcggtgtcgtggtcctgggggctgggcgtgaagctgagcactgagaagtgggaggtgcttggtctggttcttctaggggagagggcagcccccgtccaggagaaagaaggggctggacatttcttgaaagcccagttaaacacacagatgaccgtcaccggctgcccgggctccagggtctcggggatgtagacatcaggcttcttagtcagggctgggacagagaccgggtgggagattcttgtgctgcaggggtccctgagagccctctctgctcagcccatagcctgtccccagggtccctccccagtgtgacaggcaggggttcccaccccattccatacctgttacttttagaaagaacgcattgctcaggaaactatgtctcacacggcttcctctctccacccgaaagaagtaccatgcctcatcctccctctgcgcgtctctgatcaccaaggagcagctccctttgccgggatccccagtgagctggaatcggtcccgggtgctcatttccacctctcgactctggttgttagtggccacaggagcacccgtctttgggctggtccgtcctttgaaccagtagccataagcagcagtagactcgtcccagccatcccgggggtaggagaggttgcaagacacgatgacacacaggccctccggcaccggcacctgcctctgcacttgaagactgtaactgggatccttgttcagggaccctggggagatgcagaggctcagcggcagccccagcccctgcctgggacccccagccaccgacccactcacccgcccccagcacgggcagcagcaggggcagcagcagcatctctgggctctggggctgggcctgtcccgggaccatctggcttctgggccggcctggctgggaaggaaactcctccagcaggaagcctggtggaggggcagtgaccatccacagaggaggagcctcgggaaccgctatgtcctgaaagctcgcttcccaacttctcctttcacaggggaagcagcagggcagagggcatgaggaccagccccaaaccaggaaggagccaccctggccagcctcggaggtgggcagtgctaggaggggactgtcaggggacacaggtgagtcacggctgcaggtgaggtgatggatgcagagtctcattcattcattcattctccagggggccatgagacactggaagagtctacaagaacacagtgatttatggtgggggctttgcaccacgtattattgctgtatctccacagagggtaaaaactaggtcagccacacaggcagtcagctgcatctacgtgaccaacccccagtaaaaactctgaatgccgaggctcaggtgagcttccctgggtggcaatacttgctgtatgttgtcactcatctttgcttcaagcattaagcgctttctgtatgacttcactgggaaaggacaactggaatcccacatatggtctcttctggatcctgtcctatgaacctttctcctttgttgatttttatttatttatttttattttattattattatttttttgagatggagtctcgctctgttccccaggctacagtgcagtggtgggatctcagctcactgcaagctccacctcccgggttcacaccattctcctgcctcagcctcctgagtagctgggactacaggcgtccaccccaacgcccggctaatttttttcttgtatttttagtagagacagggttttagcgtgttagccaggatggtctcgatctcctgaccttgtgatccgcccaccttggcctcccaaagtgctgggattacaggcataagccactgcgcctggccattttatttttatttttgagacagtctcactctgtcacccaggctggagggcagtggtgcaatcttggctcactgcaacctccgcctcccaaggtcaagtgattctgctgcctcagcctcccgagtagctgggactacaggcacccacccaccaccatgcccggataattttttgtatttttagtagagatggggtttcatcatgttgagcagcctagtctcgaactcctgacctcaggtgatctgcctgcctcagcctcccaaaatgctggcattgtaggcgtgagccactgtgtctggcttgttgatttttttttttttagatgaagttttgctcttgttgcccaggctggagcacaatggcatgatctcggctcactaaaacctccacctctcaggttcaagcgattctcctgcctcagccccctgagtagctgggattactggtgcccaccaccatgcccagctaattttttgtatatttagtagagatggggtttcaccatgttgactaggctgatcttgaacttctgacctcaggtgatccacctgcctcggagtcccaacatcctgggattacaggcgtgagccactgcgcccagccctgccttgttgatttttaaaaagtatttttattaatatgtgatatttgtacatatttatggggtatatgtgatattttgtgccatgcatagaatatggtataatcaagtcagggtatttgaatatctgtcacctcaaacatttattatttctattgttgggaacatttcaaatcatcttttctagttattttgaaaaatacaatacgttattattattttttaagacagggtcactcaggctgggcactgtggctcacgcctgtaatcccagcactttgggaggccaaggcgggtggatcacaaggtcaggagatcaagaccatcctggctaacacggtgaaaccccatctctattaaaaatacaaaaaattagctgggcatggtggcacgtgcctacagtcccagctactcaggaggctgaggtgggagaatggcgtgaacccgggaggtggagcttgcagtgagctgagattgcaccactgcactccagcctgggcaacagagagagactccatctcaaaaaaaaagaaaaaaaagaaaaaaaagacagggtctgtctgtcacccaggctggagtgcagtggtgagatcacggctcactgcagctttgacctccccaagctcaagcaatcctcccacttcagcctcccgagcagctgggactacaggtgtgcactaccacttaatttttatactttgtttttgatagagatggagttttaccatgttgatcaggctggtctcaaactcctaggctcaagcgatctgcctgtctcagcctcccaaattgttgggattacaggcatgagccaccactacaatatgttactgttaactatagtcaccctactctgctattaaacataagaactattccttctatataaccgtatatttgttagacagacctcttcattccccacctactcacccatgcatccttctagggttccgataactattattctactctctgcctccatgagatcatagtccatgatctctgtatgcctttatgtatccatagcttagctcccacttaaaagtgagaacataatggcatttgatttttcattcctgagttatttcacttagaaatatggcctccagctctgtccgagttgctgcaaaagatattatttcattctttttttatggctgagtaatattccatgacaatggtatacataccgctgcctagaccaatgtcctgaagagtttttcctaggttatcttctagaattttttggtttcaggacttagatttaagtctttgatccatattgagttgaatttttttttttttttttgagacagagtctcactctgtcgcccaggctggagtgcagtagcatgacctcggctcactgcaacctccacctgccaggttcaagcaattctcctgcctcagcctcccgagtagctgggactacaggtgcccgccaccatgcctggcttgttttttgtatttttagtagagatgacgtttcaccatgctggtcaggctggtcttgaactcctgacctcgtgatcctcccgccccggcctcccaaagtgttgggattacagtcgtgacccactgcgcctggcctaatttttgtatttttaatagagatggattttcaccatgttggccaggctggtctcgaactccttacctcaagtgatccacctaccctggcctcccaaggtgctgggattacaggcatgagccactgcgcctggccaaggattgatttttgatgttttttttttttgagacagagtcttgcatctcgctctttcatccaggctggagtgcagtggcacgatcttggctcactgcaacctctgcctcccaggtagctgggatgacagatgtgtgccaccaggcctggctaatttttgtatttttagtagagacgaggttttaccatgttggccaggctggtctcggactcctgacctcaagtaatctgcccacctcaacctcccaaagtgctgggattacaggcatgagccaccacatccagcctgattttaatgtttatagtttattggcgcttaattcaggtcttggtgctttcagggatgaaggttctgtatgagttccttggttgtagagagtccttgtgcgctggcttctcagttgctggctgcagtggcaatgtgctcagtaagatggtgatcaagttcatcatctcctgtggggttggaatggcagaggtcttttgaagcttaccttgttccactgtggtgtgcacttttaaattaatttatttttttccccagtattttattcactgggttgaatcattaaggcttcaggttagtggggacgtgtctctgggtagaaaacagttgtggctggccggtgcggtggctcacgcctgtaatcccagcactttgggaggctgaggcgggtggatcacgaggtcaggagatcgagaccatcctggctaacacagtgaaaccctgtctctactaaaaatacaaaaaaattagccaggcgtggcggcgggcacctgtaatcccagctactcgggaggctgaggcaggagaatggcgtgaacccaggaggcggagcttgcagtgagccgagatcgtgccactgcactccagcctgagtgacagagcaagactccgtctcaaaaaaaaaacaaaaaaaagacaaagaaaaaaaagaggccgggtgtggtggctcacgcctgtaattccagcactttgggaggccaaggcgggtggatcgtgaagtcaggaggtcaagaccatcctggccaacacggtgaaaccctgtctctactaaaaatacaaaaaactagccaggcgtggtggcgggcgcctgtagttccagctacttgggaggctgaggcaggagaatggcatgaacccgggaggcggaacttggagtgagccaagatcacgccactgcactccagcctgggagacagagcgagactctgtctcaaaaaaaaaaaaaaaaaacaaaagaaaagaaaagagttgtggctaaagcactgggtaaatgcagtacccaatggtgagccaaggcccccgccttgacagaggtggctgggggagctcttagcaacatgcgctgaggtttgcttttgcttttttgtttttgacaggatttcagtctatcacccagggtggagtacagtggtgtgatcacagatcgctgcagccttgacctccctggctcaagtgctcctcttgcctcagtctcccaggtacctgggaccacaggcacatgacaccgtgcctggtcattgttaatttttgtagagttggggtttccctatgttgcccaggctagtctctaactcctggtctcaagcgattctccaacctcggcctctcaaaatgctgagatgacagccgcaagccaccatgcctggccatttccttccttgtactaattttggtttattcttgcttttctggttccttggggtccatttttttttttttttttctgagatgcagtttcactctgttgcccaggctggagtgcagtggcacagtttcagctaactgcaacctccacctcctgggttcaagcgattctcctgcttcagcctcctgagtagctgggattacaggtgtgccaccatacccagctaatttttgtatgtttagtagagatggggtttcaccatgttgtccaggctggtcttgaacccctgacctcaggtgatccacccaccttggcctcccaaagtgccaggattacaggcgtgagccactgcgcccggccaggggtccactgttatgttgtgtatttgaattcttctatctttttttttgaaagaggcatttgttgttataaacttcactcctggcacagcttttgcagtatctcataggttttggtaggctgtatttccatcttcatttcaataatttttttttttttaagacagagtctcactcttgtcatccaggctagattgcaatggcaccatctcagctcactgcaacctccgcctcccaggttaaagtgattctcctgcctcagcctcctgagtagctgggattacaggtacatgccaccatgcccggcaaatttttttttttttttgtatttttagtagagacagggtttcaccatgttggtcaggctagtctccaatgcctgacctcaggtgatccaccttggcctcccaaagtgctgggattacaggcatgagccaccgctcccggccgcaagaagcgtcttgatgttctttttaatttcttccttgacccagtggtcattcaggagcatgctgtttaatttccatatatttgtacatcttccaaagttcctcttattaatcatttctagtttcacttccattgtggtctgagaagatgtttaatatgatttcaatttctataaatatgttagatttctttcatagcctcacatatggtgtatcctggagaatgtttcatgtgccaaagagaagactgcgttcttcagctgtgggataagatgttctgcaaacatctcttaggtcccttgggtctaaaatgcagtttaaatccaaagtttctttgctaattttctgtccagatgatctgtctaatgctgagagtgttcaatgtggtgttcaagtctccaactactattgtattggagtctgtctctccccttatgtgtgctccagtgtgaggtgcatataaatttagttacgtaaagttatatcttcttgctgaattgacccttttatcattacgcaatgacttaaagtctgtttttttttttttaagtctctttttttttttttttttgagacggagtcttgctctgttgcccaggctggagtgcagtggcgcgatctcggctcactgcaagttctgcctcccaggttcacgccatcctcctgcctcagcctcctgagtagctgggactacaggtgcctgccaccacgcccagctaattttttgtatttttagtagagatgggatctcaccgtgttagccaggatggtcttgatctcctgacctcgtgatccacccgcctcggcctcccaaagtgctgggattatagacgtgagccaccgcacctggccttttaagtctgttttatctggagtaagtataactactcctgcttgtcttttttggtttctgtttgcatggaatatttttttcaatctctttgttttcagtgtatatgtctttccaagtgagtgactttcttatatgtagcataaagttgggttatgtttttgtaaatccatttagcaaaacatcaaattgtatccataaacatatataattattattatttgctaattaaaaataatataaattgtagtaaaatacccataacacaaacctactactttaaccactttattttttatttatttattttttttgagatggagtctcactctcttgctcaggctggagtgcagtgacggatctcggctcactgcaacctctgcctcccggatttaagcaattctcatgtctcagtctcctgagtggctgggactacaagtgagcgccaccatgccctgctaatttttgtatttttagtagagacggggtttcgccatgttggctaggctggtctcgaactcctgacctcaggtgatccacccgcctcagcctcccaaagtgctgggattacaggcatgagccactgcatctggcctactttcatcattttaaagtgcacaattagctgggcatggtggtgcatgcctgtaatccctgctactcgggaggctgaggcacgagaactgcttgaaactgggaggcagaggttgcagtgagccgagattgcgccactgcactcagcctgggtgacaaagtgagactcaaaaaaaaaaaaaagtgtacatttcattggcactaagtacattcacattcttgtgcaaccatcagctccatctagttgcagaacttttccatcattgaaaaaagaaaccaagtacccattaaacagtcacttcccattcttccctccccccaggcccccaaaatgacaaatctacttcctgtcactacatttgcctcttctggtcatatcagatgaacagaatcatgcaatattgtctggtttctttcacttagtataatgttgtcaggaccatctatgctgtggcaggtgtcacaatgtaattcttttttaggggtgaataatactccattaaatgaataaaccacattttgttcatggagttttaaatttgctagttaatgtccaaatcctcagccttggggaatcgggaggtgctggggcccctgcccttgagtctgcacaacccagacccccctctatgcccaggtggtaattggggctgggctgagccacaaactagtctgggcatcagggtggggaggtgacagagctgggaccctgtgatgtaaggtccaagttccccagtgggggctccatgaaccaattagacctcatttacaaaacacagatcaaaagataaattattaagaatgtccagggggcaacctcagagcactaaaccccaagcatgaggccccctgagctcactggggtcttatgtaattgcccccttctccctgtggagctgggagcctggtgtaagctgcagagacggccccgcaacaggcaggggagctcagtgcctttggggagcccggggaccctgagttgacataagtggaggtgaggatcctgtgggcagggattggatggtcatgtcttctttgcctccccccactgcatggagtagattttgcctggagaatgaatgaatgaatgaatgggactctgcatccatcacttcacctgcagccatgactcacctgtgtcccctgacagtcccctcctagcactgcccacctccgaggctggccagggtggctccttcctggtttggggctggtcctcatgccctctgccctgctgcttcccctgtgaaaggagaagttgggaggcgagctttcaggacattgcggttcccgaggctcctcctctgtggatggtcactgcccctccaccaggcttcctgctggaggagtttccttcccagccaggccggcccagaagccagatggtcccgggacaggcccagccccagagcccagagatgctgctgctgcccctgctgctgcccgtgctgggggcgggtgagtgggtcggtggctgggggtcccaggcaggggctggggctgccgctgagcctctgcatctccccagggtccctgaacaaggatcccagttacagtcttcaagtgcagaggcaggtgccggtgccggagggcctgtgtgtcatcgtgtcttgcaacctctcctacccccgggatggctgggacgagtctactgctgcttatggctactggttcaaaggatggaccagcccaaagacgggtgctcctgtggccactaacaaccagagtcgagaggtggaaatgagcacccgggaccgattccagctcactggggatcccggcaaagggagctgctccttggtgatcagagacgcgcagagggaggatgaggcatggtacttctttcgggtggagagaggaagccgtgtgagacatagtttcgtgaacaatttgttctaaaagtaacaggtatggaatggggtgggaacccctgcctgtcacactggggagggaccctggggacaggctatgggctgagcagagagggctttcagggacccctgcagcacaagaattccccaccccggtctctgccccagccctgactcagaagcctgatgtctacatccccgagaccctggagcccgggcagccggtgacggtcatctgtgtgtttaactgggctttcaagaaatgtccagccccttctttctcctggacgggggctgccctctcccctagaagaaccagaccaagcacctcccacttctcagtgctcagcttcacgcccagcccccaggaccacgacaccgacctcacctgccatgtggacttctccagaaagggtgtgagcgcacagaggaccgtccgactccgtgtggcctgtgagtgtggcctgggagggtggggcgtgcagacagccccggtgggtggggaggtggaggagcccagcaggacagtgagtggctcccagctcaggagcatccagggagaggaagctgtggggtcccaggatgccggctcagccctgggagggggatgggaatggcgtctgatcctctgtccacatgtgtgagccctggagctggttgtcacttgtccatcctgggatgttcccactttcttttccctgagggagttttttccaggtgtgaggaacaaattgtccctccctgaagccagctcacaatcttgttgcagatgcccccaaagaccttattatcagcatttcacatgacaacacgtcaggtactgagggccttcgggctggggctgggccagtcctctttagggatgaaaaggcttcaggggggtgaggggatgtggtcctctttgcagccccccctcccacccattctctctctccacccccaccctctctctttccctgtcttcagccctggaactccagggaaacgtcatatatctggaagttcagaaaggccagttcctgcggctcctctgtgctgctgacagccagccccctgccacgctgagctgggtcctgcaggacagagtcctctcctcgtcccacccctggggccccagaaccctggggctggagctgcgtggggtaagggccggggattcagggcgctacacctgccgagcggagaacaggcttggctcccagcagcgagccctggacctctctgtgcagtgtgagtgtgcctagcaggggcctggagtccattgggagggcagagggatacaggggctgggctcagtgtcccagagctgagggggtcttgaaccccaggcctcggggactgaccttcttacctgtgtagaccctcatgcagtttgtgtctgggactcagtgggtgattctgccctgcccttctatcccacccacttcccccacctcagtctccaggacgcttccctttgcccagagggaagtccctggtccgtctagagccggtcccctgtctccatttcagatcctccagagaacctgagagtgatggtttcccaagcaaacaggacaggtaggaaaggagacagaggagccagggcctctcagtgccaaattgggggcccaggtgtctggagggtccccatgcaggcgggtccctgagccctgagctgcacgtcgattctgcctcttccttccctagtcctggaaaacctgaggaacggcacatccctccgggtcctggagggccaaagcctgcgtctggtctgtgtcacacacagcagccccccagccaggctgagctggacccggtggggacagaccgtgggcccctcccagccctcagaccctggggtcctggagctgcctcgggttcaaatggagcacgaaggagagttcacctgccacgctcggcacccgctgggctcccagcgcgtctctctcagcttctccgtgcactgtgagtggggaaaggggacacctgggtcccaggaaggggcccctgctgagtcctgtcctccctcccacagagcccccccagctgctgggaccctcctgctcctgggaggctgagggtctgcactgcagctgctcctcccaaggcagcccggccccgtctctgccctggtggattggtggggagctgcggagggaaacagcagccaggactacttcaaggtcacccccagctcagccgggccctgggccaacagctccctgatcctccaagggggggcttggctccaacctcaggctcacctttgaggcccagaacgtccatggggcccagagctctctgattcctggcggacagtcagggtatagggtggggaggcctgggctcaccaggtcctgcatccagggatgtaggaagggcctggagaaccaagttgcaataagagaggaaggattcggaagtgtggtttagaaggtgaatgggccttatcccacttttccaggcaaatcagggcccatgacgggggtggttctggtggctgttggggaggtggctatgaagatcctgcttctctgcctctgcctcatcctcctcaggtgagccctgccccagggaccaaggggaggggcggagagggcaaaggatacaccgctgaatcccagaatctcaatcctgggggtacttggacagttaaagaggcctgtggccaggcagaggctgagttgatcgtgatgattccacacgggccagtgttgtcagtccccaactctggaccaatgtccaggctggggaggttcctgcttgtatcagggaggtcctgggggctaggcctgctctctctgcctcagtcccctccaaccccttagcagggcacagggaggtgagtctgctgccctcttcacccccatccagccacactcacaggccctggtctcttcacccagagtgaggtcttgcaggaggaaggcagcaagggcagcattgggcatggaggctgcagacgctgtcacggactaatctccaggtgagtgtcgtgggcctcttaccctccaacatcccgctggacacctccccctcgatggccccaaggactgctccactcaacttggccataactgactcatcacctccctttccaagcccacttctcttgttgagagccccatccctctgatgacatggtagccccatctctaacgtcagaacccgggtgtgggtgtccaccttgacctccctccctcctccagatcccaaaaatcactagcacttgtccctcctcctaagtacaggtcaccttggagcccttttctccatcctggccccggtcatgcctgggcctcacctcttccctggtcgctgaacccacctcacctcttgcctccatctctcccaacagactccagactgcttccagatgcctcctcatccagttcctccacagtctgagcggccgtgtttcctctgcaggctttgcatggtctgtcccctgctggactctcctgatccctcctttccctgtcacccaacatctccccaaaccctccgggccaaggactctgcggctcttgacactttgcacgtgtagtttcttctcctgaaacacccttccctcctgccaaaccacgtctggaccctccttcaggttcactttttttttttttttttgagacacagtctcactttgtcacccaggctggagtgcagtggcgcgatctcggctcactgcaacctctgtctcccaggttcaagcgattctcatgtctcagcctcctgagtagctgggattataggcgcccgccaccacgcctggctcatttttgtatttttggtagagacagggtttcaccatgtcggccaggctggtcttgaactcccgacttcaggtgatccgccagcctcggcctcccaaagtggtggggttacatgtgtgagccaccgtgcccagccagctgtgtcttctttttgcaggatttacttacaaaattccttgcagctgcagtctgcgttccacccacatcctaatatggtgtttgcggtggtcacatccaacttccttcctcctccatccatggaacgtgcattagggaggaaccacacgcaccacgtgcaagatgagccagttccctgaacggccggccacggcgttaaccgcgctgctctgggctctgcacgtctcatctgctgaggcgcattactgcatctttcatgcagaacttgctttccatgcctcacatctccacatgtgtggggatatgtcctgagaaatgcacggttaggtgattctgtcgtgtgagcatccttgaatgtgcttacacagtcataaatggtacagcctaccacacgccgaggctatacggtatagcccattgctcctagactatacacctgcacggcatgttcctgtagtgaaagctgtaggcaattataacgcaatggataggttaaagacagagttttagtaaaaatatggcataataggccaggcgtggtggctcatgcctgtaatcccagcactttgggaggccaaggcaggcagatcacaaggtcaggagtttgagaccagcctggccaatatggtgaaacccagtctctactaaaaatacaaaaattagccgggtgtggtggcgggcgcctgtagtcccagctactcgggaggctgaggcagaagaatcatttgaaccaggaggtggaggttgcagtgagccgagatcgcatcactgcactccagcctgggcgacagagcaagactgtctcaaaaactaaaacaaaaaaacaccaccaccaccaccaatgtctgattaaatctaagccacggttccattttggggcaaggggcagggtgtgggtgtggtggacagagaacgggctccagccaccatcagctgcacgtcctggtagcacctgagccattcccagtctcctgtgctgggagatcatcatctaatcctgatgatgacgccctcctctcagagctcgggggatgagctgccaaaacccatggaggttcaaaacccgggctctggagacagaagacactgggctcagagacatggggccactgtccaggctttccctgggcctggacctgggctccttccactgtctgagcagggtcagcctgggctggctgtgctggttcaagagatgagggaggaggacacagcggttgccaggaccctgaggcactggactgggcactgccccaaggggcagaggatggaacccggtgttgatattgtgatgctgacccgtctgctcacctgatttgggtgctgaagggcagctgacccccctaatcttttatagacttgtgaaacgaaaataaataaaagtcaagctgggaacagcttagggcaaacctgcctcccattctattcaaagccacccctctgctcactgagatagatgcatgtctgatcacctcagttgggaaaggctaatcagaaactccaaagaatgcatctgttcatctctcacccatctgtgacctggaagccccctccccacttcgagtcttcctgcctttgcttcaagttttcccgcctttccaaatggaaccaaagtacttcttacatatagtgactcatgtctcaagtctccctaaaacgtataaaactaagctgtgccccaaccacgctgaccatgtcatcaggacctcctgaggctgtgtcacggcctgtgtcctcaaccttggcaaaataaactttctaaattaactggacccgtctcaaattttcggggttcacagactcatgtgcaacaaggggtctaagcaggacaggttcgggggggtttcctattgttagcagatgtccccttctggaaaggggtgcaaacacccactttcagccaggagatggtaagcggttccctgatcccacctgcttctcctgagcagggtttatcagtacaggagagtcagggtatctgagagcacttccttccttacctggcctcagattctccacactccaaagtatgatgcatgatctgagttactcaagacaaaattcagggaggcaggtttagcttctctcttccttttttttctttagacagggtcttactctgtcgcccaggctagagtgcagtggtgcaatcatggcttgctgcagcctcgacctgctgggctcaagtaatcctcctgcttcagcctcccaagtagctgggactacaggcgtccaccaccaggcctagctgatttttgtattttttgtagagatgggtttcaccctgttgcccaggctggtctcaaactcatgggcttaagtgatcctccagttttggcctcccaaagtgctgggttacaggcatgagccacagcacctgggccccaaaagaacttttacagataactgactcctcaagctctggtaaaacaatttattaccaaagcacagaggtgtcaagggtaggaggggtcccccctgtgggccggcccaaccccatccagctttgctaggacactggctgaagggcaggccaccaagatggggaacttcacattcacgggagggaaactggggccctccgggaggctaatcaggactgatgagtatcctgaaaccagtggcaggaatgcacattccagggcttgttctagaagcttatctgtgattaaacagcaggccttgagtcacattacttcatttttttttttctgttgcacactgcaaatggaaagttctggaagacaataaaaatgctgttagtgtctcattcattcaaggaacaccctctatgccttcacttcatgccaagcaccttctaggttctggggatgtcatcttctaggtactggggatgtcatcatgaccatacgggatgaggagcccctgctgggcttaggatgaggaggaggcgggtggagactacacactaaacacacgcttccctccagatgggaacaagggctgtgtggaaaacaggtgacatgatgagcaagtgggtggggaggcagtgaggatgcctcatggaggatggggaaggcctcgggtcttgagaagcagcaggtacataaagccaggatgaggggagctttccagaactcgggatggcaggtgcaaaggttccggggtggggtccagcttggcctggtctagaatcagaggggcgggggtgtggctggtgcatcgtgcacgggggaggaagggagctcggcctcgggccaaggcaaggagctgctgtggagcacaggcaagatgaccttcaaggtgctcgaagatcactgggctccttaaatgccatctcctcgttatgttcccaaccaaggggctgagtgagtggcctccagggagcgcgtgggtgtgagacggtggagaccctgggaggttgtcaggtgtcaggttctaaatgccctttgccctgggtgaggaaggcactgtgagacacagtggcactgacgacgggaagcctgggctcgctccatcgataaacaggatgaagcctctgccctgtgccatgccagaaaagcagagatgacagagtcagacgcgaccctgccctggaggagctggctgccagcagaagactgtgacaagtgaccccgtggtcagtctcacccgggaccgaaggtttggaggaggctgctgggggagcaagggtgttggggaggaccccgagctgtctggcctggataactgggtacacggaggagctgtgtatcgagctggagaggtgggggaaagagggagattggcacaggtcatgactttactctcggcaccactggttgaggcagagagcctgctactccaccacggagaaaagagtccccacccctcaccactggcccactctgtgcgcaggtgctccacgaatcgcttgacacacacgtgtcagctcaggtttcagcctcagatgtaaggaaacgttgtgggaatgcagaagcacttgtaatccaagcgccaagaagaacgtcgctgcgccgggagacaggccgtcaaaaggagatgctgttcaagatgccctgcgactaggatctcacaatcgtggtgctgctgaccacggggccgggggattctttgtggggtggtacaggtgggcaccgtgctgcatgtcacaggatgtcaggcagcatcccggcctccactgtcccgcatcctgacaaccaagtgtctccagacactgccaaatgcccccagggtggtgccaaatcagacaaagcactgagctttggttccagccaactccgatgagagaaatgactactccggggagagaaaaggagcctggagaagctcctcttcagcacacatctctgcacccttgccaaaatttactgtgtagtctgtctttgaccttgtaaaaattcctgcacgtttacacaaagtgctgatggaagtaaagccatctagtcagcactgtcaagttgatacctccatccacagacagcgtgcgccagcagccgggctgtgcacacaggcagcactgttggtaaaataaaaatctgggaaactaagcaaacgcccagctgctggctgtgaggagtgtccgtcatccacaggaaggggtagtgcgcactatgaacgagacccgaaggcatggagcagctaccttttgtgtatgggggcgccaagggggccaggccaaaggaaagtagagactacaggtggccgggtggaaggacagagggaggcatggatgcaagaagggacagaagatggcgagagacaaacaacgtcttgatgctatttttgaggccctgaatcccgttgtgcctgaagctcccccttgtaattttctagctacaacagccaatcaatccccacttttcttaaagccaagttgagccgggtttctgctacttgccattccttgaggctgggaagttcaaggaccgtgcggaaaaacccagtgtctccctgggaagctgggccctggtatgaacgtggaacagcctctgggaagtgtctcctggagcctggggcagggctcgggtgagggcaaggggtgagaggcttaagcctcacaagctcttcccacctggattccacctagggcaccatcgggaggccaatggggtcatatggagacacacgcagatcctgcagcaaagcttctaggttgttcctcagcatggcgtagggcggcttctcctcatacgtgagggccatcaccaccttcaggtacttctgcagggtctctgtggtcaagacaacccccagcaagggagagcctgagaggcatcccccaaccccgatcctgggggtctccacccaaggatggaggggtgggggactgaggggcatgagggtctcagcaaaagtgcccattttcttgttgcctggcattgccagaggacttcaattgtttttcagttttggaaaatgtcatacgcaggcaccagtagaagggcatgaacacccaagtacccatcactcagtttcaacaaggatcacctcacagccaatcttgtttcatcaagacccctcccctggcctgcagtgttttaaagcaaatcccagctagcaatgcagtctacctgcatataaatatttagcatgtatctttaaagagggcgggccctgcttcacctccacctccaacctctggctgaccagcttaaaatcctcgaggcccaaggttcacagaggtagaactggaggggagtgtcacttgggcagctgagccataatctgaacccagggatttaaagtaattcagccgggcgcggtggctcacgcctgtaatcccagcactttgggaggcagaggcgggtggatcatgaagtcaggagatcgagaccatcctggctaacacagtgaaaccccatctctactaaaaaaaaaaaatacaaaaaattagccacacatggtggcgggtgcctgtagtcccagctatttgggaggcagaggcaggagaatggcttgaacccgggaggcagagcttgcagtgagccaagatcacgccaccgcactccagcctgggcgacagagcaagactccgtctcaaaaaaaataataaaataaattttaaaaaaataaataattaaaaaatgagccttagagagccagagggaacaagctatctgtttctgtctgtccatttctgcctccagcttggagaaaagcatcaaagctcttcaggaggggcacaaagacaacaggaaaaacaaacacccccgacaccccaacaagacagtgcaaatacccagtaacagggattggctttataagttacggtgcggacaaaccatgaccattgtgcagctgttgataaaagctgtggtgcatctataaggaagggcatgaaggatggccccagggttaagtgaaaaaagcaagaggtagaatgagatgtatgtagggtgagcttattttttgttcataaaaatggccgggcatggtggctcttgcctgtaatcccagcactttgggaggccgaggtaggtagatcagttgaggccaggggttcgagaccagcctgggcaacatgatgaaaccccgtctctactaaaaatacaaaaaactagccaggtatggtgacgcacgcctataaccccagctacttgggaggctgaggcacgagaattgcttgaacctgggaggcggagactgcagtaagctgagatcgtaccattgcactctagcctggatgtcagagctagaccctgtcttaaaaataaaaaaaaaaaattaccctgtcttcaaaaaaaagttgtgtttttgttttgtttttcagaggcactagtgaatcttttgacgattttgtctttctacaatgggtacgtattacaaatgcaatttggaaaactaaaaaaaatgaagaggtgtaaggagaagccaccccaagatggatctgagccaccaggtcctgcccgagtccccgcctgttcccgctcccttcaggacgtacctgagggcctgatccagtgaccgcagggtcccacgaagggccccggcttatcaacaaacctgaagggacagaaacacatgtgaaaggtctcttagggaaaggagagcaaccttttaaaacagaatgcctaagatatatacacagcctaagatatatacacagtcccctctgccatccagggaagttatgttcttaaagtcactgtgaacactgaatcaaccaatccactaccattgctcccaagggaaacagcactgcttcctgcaagcctctggccacacgattttccccgatcaatacaccttgttttggccgggcacagtggctcacgcctgtaatcccaacactttgggaggccgaggggggtggatcacgaggtcaggagatccgagatcatcctggctaacacggtgaaactgtccctactaaaaatataaaaaactagccgggtgtggtggcgggtgcctgtggtcccagctactcgggaggctgaggcaggagaatggcatgaatctgggaggcagagcttgcagtgagcctagattgagccactgcactccagcctgggcgacagagagagactccgtctcaaaaacaaaacaaaacaaaacaatacaccttgttttatgtatgtttctgttgaaatacatcttatgtaataagtattgttgattcattagcattgaactcttttaatctgtgatccttaagacggagaggatccctttgatgatgaggaaagatccaagatggaaataaagattttattacttacaggtcctgggggcacaccgcacacccaaaggtgacctccccacccgtcccaagcacacacacagacacacacacacacacacacgcacactggtcagggagctcgtggctgtgaggggccaatgggcggtatccaaacattttgaggagattttaactggtaggttcaaagcaagcaggctcgacttcaggaggtcatgctgtgcctgagagggggtcactgtggcatccgcacagttcagtggaatgtgggggccagcggggccgtcaagtaggctgtctgtggctgactcaaagggagggaggtggtcccccggaggcggctgcataacggagatatctgggtcaaccacacggaggaactgggaggaggtggaaaactgcaaactgctgacggtgaccgagccttgtttctggcatgacaaagtccagcttacattaaaatgaatcccaaggcaacctgaaatgataagaattccccacagactcatgaccaacagcaccgtagctcatgcctgaacaaagctgataaaacacacgaattattaaccatctcaggctttgggacatcagacagcccttcagcattatgctaggtggctgtttgattttttgtggagatggggtctcactatgttgcccatgctggtctgatcctcctgtctcggcctcccaaagtgctgggattacagatgtgagccaccacgcctggctgaggccattttaaatggcataatcactgacaaaaagcataaaaacaggaaaaaatgtatcattaactaaacagtgaaaaggacaccagcgtatatagtgtggaggctgaaatagggaggcagaatgctgtctggttccaccctaggctgggaacatgtgtgtcagatgattaaaatttttctccacactgtgtctgtaagtggccatgaaagaacagcaagaattgatttggggttacaactacttttagtgagtaagagaattcacacatatggactctgaataatcaggactgactgtatatgtacatacacacacatacacatatatgtataacacaaacacatgcatgcacgtgcaaccgtttgttcaggaaaaatcctgatttgcccactgcctttgctccatcctccaggcccagcccctccacttctctgcctggcccatcgggccagctcccaccacctgcccagtcactggtctctgaccctgccttcgccatcccccagccccaccctccagtttctcaactctctctgccccatgtcctcctctgccccatggatctggggccagctcagccctcaacctttctccctggacctcaactccttgctggcctcctgtgtatccccatgtggacccagagggtctctttacacctgtccctgaccctccctgctcacagcccaccctccctcccatggctccccagcacacactggccaccctctgactccatctccccactccttcctcccattgcatgtcccagccacaccaaaggactcctaggcccacgaggccacacatccacgcacgtatgcctctgcacatatcgctctcgctgcctgggtggtcttccccaccctgagctctggcaggtggctgttctccctttgagatacagctcgagggcttggcctcccaagaagtcttccccagacccctccaggcggaggaactctgtccctcctgggcctgtgcgtaggtccacagatgtcccatggcggccattgacatacatgcgcaggaaggcccggttgtgccatcaacaggacattatacactgcacagcaacaccactgccaccacctgccatgggctctccctggccaggtgggcagccctaacagcgggtccaaagctggctctcatttgtgctttgcccagcaaggggccttgaatgccagaaagcctcggggacttcaacggcctctcctccttcttttactcattttgtctgtcgtgaactacaatgtgcaaaaaatgagtatctgttgaatgaatggaaaaaggccatgtataccagtaaaccgtcctagcgcagggcaccttagggtgccaggaaacgagcatgtagcaacatcgcccccttgtggtccccttggttattgtctgggctaacagactatgggctgggggtgaggaggtgcatctgggggacagtgtcaacattgccagctactctccagagagcatttttgtgcgcctggccctctatggttgtggtctggagctggggctgtggaattactgttatccatgctgctatcattgatatgagatgattaccatgacctgtcttaactcaccctgcaccatgttggcgagtgcagaccctctctgtgaaccagtcacattcaacaagtctctttagatggggggatgtgaaaagcatgataagaccgctcttaggagttaggaagtgaagtggggagaagactcaaccgaggggagccttggagaccagtttccctgacaagactggagttcagaggcaccatgggctgattctaacctgggtgtccagcacagccactggcctcaggaacctggcactgaatgcgtaagtggagagggttcagagctgtgctgtcctgtctgcctaggaatcttgcctcccccttgcccacctgggaggctcttgtgttctctagagaccaggtcaggcatctcccaggtgagggtttccaggagccggtggcggggtcctgtgcctcccctctgctcccacagtgccgggctacctccaccctcacctgcagctcctgcttcctgtccgtgtctcctcccagccctgaactcccgacattggggctgcgtctgcccgacctctgtgtccacactgaagcctgggcgggctcagcattcactccttagttgttcttcattccactacgatttttctttcctttttctttttttgagacagggtctcactatgttgcccaggctggagtgcagtgacaatcacagctcactgcagcctccacctccttggactcaagtgatccttccacctcagcctcctgagtagctgggactacagtcgcgtgccaccacacccggctactttttttgtagagatggggtctcaccacgttgcccaggcgggtctcaaactcctgggctcaagcaatctgcccacctaagcttccaaactgctgagattacaggcgtgagccaccgcaccagatctgctgctattccttgggcacccacaatgtgtgctctctgttgtatccagagaaggatgtgtgtgtgtgtcacagggaattgaggcccccctactgccctcagtctcctgccttgggactgttagtgagaggagtgaaccctccctcatggaagctgcagtgttttggggtctccttgtgagaacagctcagtcttgtcctgaactaacccattagagtgtgtgagggagcatttcactaccttcacttacacagggactccagcgggccactcattctgtgactcgttttcacctggcttcatttcaaaagaaacctgtctcaccactgtgagcagaaaaccccagcaccatctgttaaagctagagagtaagtgtaaaaataagctccaagaaaatggggcaatggacttgtgttctagcaggtcctgaggctggcttcccatgcagaggttgcctgcggaagtctgggggctgaaggcctgtctcttcctctttccgcagggatgttggggcaaattagcatcaaactgtgtcatccttcttgccactgtttaaagcttcatggtccttcagggggcattttacctgttaccatcgctgcgagacctgcccctgacattagacctacaagtgtgctgcacacccccaccaacagtcccaccagtggacacccaggacctggcctcatgaccctcatcagtctgacctctgacacaccatgtgtttcaccctttagctcctgtctcccgcaataggatgtgagctccctgagggcagggatttttgtcttactcattcctgtatccccagggcctagaacagagtctagcacatggcaagggttcagtatttgttgagtgaaggtaggctgggtccaggaaccaccagttcacctcataagcctcctccacttgggaagcagcacgtaggtgacatgggctgtctctggagttgaatggcccaggtttgagcccaggagcccctgcttagtagctgtgtggcctggactgattacctaagctctctgtgccacagatcacgagagcacgcagctcagagcagttgtgaggatgcaggggaagcaccaggggcagtgcctggcacagacaagtgtataataaatgttagctttgaacagtcagtagaaggaagtcaaaatgacgacacacatccccttctctgaaggaggatgaaattctgggcatggtgccacttatgccaattaaacacatacccaagaacatcatagagtttttaaggacacagatgcatctaaactaacacatttaggagtattcagaagtagtgaactaggtgtatagttaaagttaaaaacataacattgagtgaaagaaggcaagaaacagcatgaggtttagagcatagtgccatttatacaaattaacacacagtaccaccatatatagtttaaggacacagacatgtctatagaaaattgatttagaagccggagtcagaagcagtgaactcggtccacatgtagggatagggttaaagctgaagagagccagagacagatgagacgcagagtggaacatcacttacgcaaatcacacacagcaccacggccagcatgcgattttgagggtacaaatacatctaagtgaacacatcagaacacatgttaagtgtgcttgagcagctgtccatggttgagagaaggaagttgggagacacgaagggagtaaaataaaacgagaaaggcttcatgtgagggaaggactgggaaggacttcacggcacactaaggacagggaaacatgagggactcaacgccatttactggagggttcaccctcttcccactctatatgccttcccagataatctcatcctctcctggggcttcagctgatggctccggagatattcccggggtctgagtctccctttagacttcactcctgcacttcagacgtagatggccagctgcctcccagatgacttgggcaacaagtccaagacggagtcttgctttgtcacccaggctggaatgcagtggcgagagctcggctcactgcaacctccacctcccgggttcaagcaattttcctgcctcagcagggattacaggtgcccaccactgcttcggctaatttttgttattttcagtagagacagagtttcactatgttggccaggctggtctcgaactgctgacctcgagatccatctgccttggcctcccaaagtgctgggattaaggcgtgaaccaccgtgcccggcctgggcaactgatattcatgtctgaagtgcatgcctagcacgcccgctaggatcagctgcccactgtccttggtgctgaactcatacccacagcgcttcccttttgtgctccgctgtccctggtgctgaacccacatccctagcacttcccttttgtgtcccgctgcctgctgttcttggtgctgaacacacaccttagtgcctcccttttgtgcccagctgcctgctgtccctagtgctgaacccatacccctagtgctccctctgtgtccagctgctcaatgcccttagtgttcaatctcaccccagaacttcctcatatgttccgctgtccaccggctttggtgctgaatgtttaaaccagcactggtaagacctggtggtttacacagaggtgaaggcactgatctggcagtgtggacactgcataggtggtgctaccagtgctgaggcagggcctgggcctatcctgctcagattgcctgcatgtttgtgatgaatgagtcatagtttcccacacacaatgagcttttttttttttttttttttgagacggagtctcgctctgtcgcccaggctggagtgcagtggtgcaatcttggctcactgcaagctcccactcccaggttcacgccattctcctgcctcagcctcccaagtagctgggactacaggcgcccgccaccatgcctggctaattttttgtatttttagtagagacggggtttcactgtgttagtcaggatggtctcgatctcctgacctcgtgatccgcccgcctctgcctcccaaagtgctgggattacaggcgtgagccaccgcgcccggccacaatgagcattttctctgagccagcccctgtgctaagtgctgtgtgcacctgacttccctgaactctttgcagtcccataaggtagtagctagtaggagaccatctcatggagcaggacactgaggctcgcagacgttaacaccccacagtggtggtgccagagtctgagcccaggcagtgtggctccggaacacctgcctcgcctgctgtgtggacactgcagcacatgcctgtgcggctcagaggacttgggctctgctggatgccacctccccttccctcctgctcccagttgggctctgggcttctgtccacctgcaggggttctgctgaccacctgcaggggttctgctgacccctagactcacttctgtttttgcttcatgatgtcctcagtgttgggaaggcaatttgtccatggcagaaacccgtagagccacttcagcatgcagtagcccaggctctggaggtcgctgcggcgggagggccctggggaaggaggagtaaaggtggcagctcaagtctggacgctccactcactggtgggtccaccccccttccttcccctctctctcactgactcaaccacacactcatacacccagccttccagccatatgggctgtctcctccgctcattcactttcatgagtaggcagaagctgactcattctctctctcactcaaccattctctcagccccttttaccaggtcaccctcatccactcctctttcattcatgcactcattcaatcaagcctcagcacccgtgtgccaggcccagctcacttctgaaaacccagaccaggatctcgtcgggtcccagcccgtgacagcctagtggggagacagctatagcgtgcgactacctgagtgacaaaggacacagaacacacgggagcccagaaggatgggtaccaaacccagcctcagtgggggagggcgggggagactctgacagtttatttttcttatgcttcctgagcataagacaacgcttaatttagacaacgctttgtgtaagcactcgacaagcactacttgtccgtgctggccttccaccacccgatgctggaggcaggggtgccatccctgtactgggggagctcagtctgatgggaggatgtggcaggcatgtggacggccatgatataaagggatgtgagaaagaggggctcaagaaatctgccctgggccctcttcctagtctgtacactttccctggatgatcccatcctctcccagggcttcggctgataacttctgagatactgcagagcctctgcccagatctccctcccacactccagatgtggtggccaaccacctcctcaacagcccctcctggatgactcctaggcaactcccatcttccaagtctacaacagatcctgaaccccaacctctggaactcaggctccccagtgcccagcctcccactatgcttagtgctgaaccgctaccccacccacctcccttgcggtcgggacgctgtctgtggttccaatccctgtcctggcgcccttagtgcctctcctgtctggccacctgctgtctctggctgtgaactcctagagctgcccttgtataagaagcatctctctgcggtcccaaacccatccctggcctcgtaccgcatcccttgtgcaggtccatgctaatgaactcaaggtccccctcgtgagggctcctgctgccttccacgtaggccacgtgtttgccacttgggcaatagcggaaggcgaagccatagcctgccaaagtcacctgtggacacagggaaaagccatacagattggaggttaggagcgtagaagtcagagatttccatcgtgggtgcaagtgacaacaaacattctaccaaagatggcatttttcacttacaaaactaaggcatgctcatagtaaaaatgatgtgaagtaaaaagaacccaaaccagccatccatatttcctcccagcccctaaaacccatcgcccagaaataaccactagtaacagtttcgtatgcatcattccaaaatttttttttttttttaaataaccaggtaaacatatgtggatggggagggggctcttgttttccacagaggcctcacaccagacctcctgttgggcaccggcactttacactttaatagtggttctgggcattaactctggggccagatggcctgggttcaaatgccaactcagcccgctggtggcggtacaaccttgggcaagctataccagttctctctgctatgatttctccatttgtaaaatgatgataataatagtccccacctcaaagggttcttataaggcttaactgagtttaaaacaaaagttaaatgctttctgcctgatacataaagttaaccaaatcttctttcaaaaatatctacttatttattttgagatggggtttcactctgtcacccaggctggagtgcagtggcgcgatcacggctcactgcagcctcctaggctccagtgatcctcccacctcagcctcccgagtagctgggactacaggcatgcaccaccatgcccagccgattttttgtaaagatggggttttgccctgttgcccaggctggtcttgaacccctgggttcaagtgatcctcctgccttggccactgtgcccagtccatgtcttcttttcaatggctgcatcttattccaccatatggatagtggacaactgttggttttgtctatgtaagacctatatacacttccccggctccctgtttttctgtttacagtttgtggtgttcattaaaaaaataattttttttttttaagttttgagacagggtctcactgggtcacgcaggttggagtgcagtggtatgatcatggctcactgcagtctccatctcctgggctcaggtgatccttctacctcagcctcctgagtagctggaaccacatgtgtatgccactacacctggataggttattattttttattttgtacagatgaggttccctatgtttcccaggctggtctcgaactcctgggctcaagcgatccgatccttccactttggcctcctaaactgctggaattacaggtgtgagccactgggcctggccatgatggtcatttttatgtggcaacttgactgggccatggggtgcccagacatttggccaaaccctattctgggagtgtctatgagggtgttctggatgagatgaacattggggtttgtagactgagcaaggcagattattctccttaatgtgggtgggtctcattcaatcaactcaagatgtgaatagaataaaaagctaagtaaccagaagctcctcctccctgactgcttgagctagaacattggtcttttcctgcctttggacttgaactgaaacaacccctcttcttgggtctcaggcctgctggcctttggattggaacttacatcattggctctcctaggtctccagattgcaaactgaagaatctcaggactgcttagcttccattatcaataagccaattccttataataaatctctacacacacacacacacgcacacacacacacaccctgccagttctgtttctctgaagattcctaatgcttagttccaggattttcatctgggattgcttttccccagttctcagtccacgcagttcaggtctgtttctgccagggctgctaagctttggggatttaagcctaatttgctggtggcaattttgtcaccatgaggaataagtctgcctgacaacgagcagtgcagaagcatgaggagtccagagatgggagagccggcttcccaatgacagggtttgagctcctggatcctgccgtgcccgagacagtgcagtcctggattgctccattctgtggactaatacattgcacacagtcccttttggtttttggcttaaggcatgtaaagttgggtttctgtcatttgtaattgtaagagcaattagaagttactttaaaatactatttaatcagtatcccgcttaaggtgtttcccatttcactattacaatcagtgttgccaggaacatcttgtacacttatctttgaacaatcctatgaatatataggtaggacaccttcctaagacaggaacttgtggatcaaaaaacaggtgcattttggccgggcacggtggctcaggcctgtaatcccagcaccttgggaggcaaaggcgggcggatcacctgaggtcaggagttcgaggccagcctgaccaacatggagaaaccccatctctactaaaaatacaaaattagctaggcgtagtggcgcatgcctgtaatcccagctactcaggaggctgacagagaatcgcttgaacccaggaggtggaggttgtgatgagccgagatcgtgccattgcactccagcctgggcaacaagagtgaaactccatctcaaaacaaaatcaaagacaaaaaacaggtgcatttaaaactgtgactgttattgccttccaaaagggtttcccaattcatgcttccaacagtatatgaagaattcctacttccttatatccttatcagcaatgaatattattatcatgcttaattttgttcaaagggtgaaaatagtatcttgttttaagttacatctctatagttactaaggaggttgaatatcttttcatattatttagctagcctgtggatttctttttttaagaattgcttttcttatcctttgtccattttcctactaagttgcttatcttatttatttgaaggagctctttatatatgatggacagcaatcctttgtctgtaataagcactatgaaataaatagagatttggagacagatgggaacctgagcccagagatcttccagagtgggcaggagctggctcttacctgactctggtcctctggatccacaaagatattttcagctgtcacatttccatgaacatactcattctcatggaggaactccagggcatccagctgggggaagaagcaagtcagtgtctgcatgagcagtacgactaacacagagaggctatggtgcagaccaggagggagccccactattaaggcctggggttgtccgacactgtgactgggggttaaacctgactaaatccggggtagcatgaggagcccgctgtgacagcacattgagcacgcctctaatcaggctctcaggaagctcatcaattgagctaaagcgtggcttcctatctactcctgtatttctctcttagctgatgacaaactcagcagagggaaaaggggttaatgtctctctgcaaaaatgactcagcacctgtggatatcaaagagctcttctcacctgtcctagagagcagaaataaatcttgttaagcaatttatatcttgatctccagctccagctgtccctatgagctccagactctttttttgctgtgtgtatatatatatttttgagacagggtcttactcctgttgcccaggctggagtgcagtggtacaatcactgctcactgtagccttgatttcccaagctcaggtgatcctcccacctcagcctcacaagtagctgggactacaggtgggtgccaccacacccggctaattttttgtatttttattagagagggcattttgccatgttgcccaggctggtcttgaactcctgagctcaagtgatccacctgcctcgtcctcccaaagtgctgggattactggcatgagctgctgcgcccggccaattctttgattgtgtctgctgcctgagtgtcagctacattctgatcatatccccaaccctctttgaccccagggctctactgtccaccaaattctgctcgttctcctcctatagactctccacccccggggcccgggaccctcctcagccttgtcctctcccacatggaccctcactcagattcttctccccattccagtccctccccatatggcccctgagggcctttctgtacccagagctgaccccgccctcccctaatcccagcactcttgtggctctccagtgccctcaagacagatcccagcccctcagcctgctgtgcgaggccccgtgtgatgtggtcaccgctgacctctccagaccaactccatctcttccgcactgcagtgccatactgcagatactgaacataaagaccttaggactcagcatgtcgctcccttggtacgtccatccctccagcgatgcaaactgggccctcttactctcaatcacagcaggggccgcttctattcagagcacttgtcatagtttgtgcaactgtttgattcactattggcccctcccactagactgtgagctctaagacacagaaaccatgtttatgctgctccctgctctgcacccagccccggggacagcgtctggcacccagcaagtgcctgatgaatatttaatggggatgaatgaatgaactaatgaacaaatgccatatgctctcccttccacacaagccttgccccagctgtatccttggccggaccatcctctcctcatctatcctcttcctcttccacccagcactttgctatttccactcatcctgagagtcttggcttagaaacaccctccaccaggaagcctaatctaagccttcagtttgaggccggggctccttcctccaatgctcatggccccccaagggccctccacaggactgaccacccatcatctcggctctaaccgcctgccatggcagtcagtgagccagcccccagtgtgcagcggaggggggtgggggccggaagtgtcaatgactaaagtgcctgctaaactaggatgtgatgtgccctccctgacgcggcagctgagcaacttctgggtacgcaccagccggcaggccacctgcagcacagacctctctgacagcacatgctttgggctgacatccagggccgactgaaggctcctccccaggctgggtaacaccaagaacctggaagacacaagcaccccaggaggtgggagatgaacaggggagagaggagtaccggccgccaaggatggactgttgcgtgggctgcaaggtcctggtcccaggtgagatcaaaggttctgactggctgggcagcaaactaggtcaaaactacgagaaggcaggaagcaaagacctggcccacggcttcggggtcccagccatgcctggagtcacaacaggaagaagaggaaagaggccggtgaggcaagcagtgagcagagcagctcacctgtatttgtcctggtgaacaccgaaacccatgcaggtagggatggccagcagtggggtcgagtacagcttcttccacttgttgactgcggaaagcaggggcttgaggttagaacccacccagtcccaagcccatggcagtaagagctagttctcagagaagaagcacagagtgcccagaccgcctccaagtctccttgttggaggtgacaacattgtgggtgggtgatggtgggaaggggctggtgacagggcaggcatgggtgaccatgaatgtctgtgatccaggtctgcaggtgatggggtgatcatggtggctctggaggaagcatatacaagtctggagtgcagagatgggataatgacagggttacttccgaattcacacatagagctaacaagatcaacacgtgtctaacctagccatggcatcaccggaatgtgcctctgcctgtcttccagatctcagtggggtggaccagaaccaatggcgagctgatgctagtttaacagctggctatccagggaaggcagtcctgatgggtagcatttgctaatttcttttttctttttttttgagacgaagttttgctctgtcgccctggatggaatacaatggcgcgatcttggctcactgcaacctccgcttcctgattttaagcaattctcctgcctcagccttccatgtagctgggattgcaggcttctgccaccaggcccagctaatttttttttattttttattttttttgagatggagtcttcgtctgtcaccaggctggagagcagtggcgtgatctcggctcactgcaacctccacctcccaggttcaagtgattctcctgcctcagcctcccgagtagctgggatcacaggcacgtgccaccacatccaactaatttttgtatttttagtagagatggagtttcaccatgttggccaggatggtctcaatctcctgacctcatgatccgcccgcctcggcctcccaaagtgctgagattacaggcatcagccaccacgcccggccttttttttttgtattttcaatagagatgggttttgccatgttggccaggctggtctcgaactcctgacctcaggtgatccaccggcctccgcctccaaaagtgtgggaattacaggcatgagccaccgcgcccgactgcatttgctaatttctgcagtgtaaataaatactcctgctatggccaactccaagctaccaacatgacatgactggaggtggggtgggagagatatacaggggaggccatcatgcagcattctcaccacacagagacaatagtgcacacaacctcactggcagagatcacaggacatgtaggaaataattaggaagtgatgaatttctgagggttcattacctttgttttgaatataatttatttgtaaaattatgtaacttattttatatattttttgagactaagtctcactctatcgcccagactggagtgcagtggcatgatctcggctcactgcaacctccaccttccaggttcgagtgattctcccacctcagcctcccatgtagctgagattacaggcacacgccaccacgcctggctaatttttgtatttttagtagagatggggtttcaccatgttggccaggctactcttgaactcctgacctcaggtgatctacccacctcagcctgccaaagtgctaagactacaggcatgagccaccacgcctggcctatataatttaattgctagtactggctgtctgtaacaaccagcttgccatcttcctaaaaatttatttttatttttattttttttggagacagggtctggctctgttgctcaggctggagtgcagtggcacaatcacagctcactgcaatctctgtctcccgggctcaagcaattctctcagctcagcctcttgagtagctgggatcacaggtgcatgccattacacccggctaatttttgtattttcagtagagataaggttttgccacattgcccaggatggtctcaaactcctggcctcaagtgatctgcccacctcagcctcccaaagtgctgggagtataggcgtcaacccacgcccagcctgaaaatttaatacttggcttccaagagctggtgtgagccagtcacaacacacactgaggcctgaggggtcacaggagtcaggttatggacacagatgggagcaaacctgggcctttaatctaagcccacccttctcatgcctgcaggtagaagtcaagtgctgtgaccaagttggcgcccccctcactctcccctccttgcccagttccctgtcaggtaccttgcagaggcttggcggcccgctggaagaagttctgctcattgaacaagcgcccatccttggcatcctggtgggggacaggaggggcagaaggctgtcacactgaagtctcagataagggcccccagtccccactggcaatttgttactccctcaatgaccaggctcctcatcaagtccccacatcggagccaaattcctcaggtactgcacacaaacacacatcagagactgcgagctaccttgctgtacccaggttccttttctttctcttatggtaagagccacagtgttccctagaatgtagccttcagcataaaaactacgtttcccagcttcctttgcagtgaggactgaccacatgaccaagttctggccaatgaggatgtgagcagaagaaatgtgggcaacttccaggttatgcccttagtgggctgggacaggctctacctttcctcttctgttccagctggctgcaacgcagatgtgatggtggaagctgaagcagccactacggcccaggagatgcaggttatgcgttgaaaatgttggtgcaaaaagaaggaaacagggccccttgtttataaaaccatcctatcagctctggaaaactgcccctgacttttaaatgaaaaagcaataaaacatcatcttgcttaagccaccattaatattaggtatttgttaaaataacactaaatggccaggtgtggtggcttaggcctgtaatcccagcactttgggaggctgaggcaggtggatcacttgaggttaggagttctagactagcctcgccaacatggtgaaaccctgcctctactaaaaatacgaaaattagccaggcatggtggtgcgtgcctgtaatcccagctactcgggaggctgaggcaggagaattgcttgaacctgggaggcggaggttgcagtgagccaagactgcacctccagcctgggtgacagagtgagattttgtagcaaaaaaaaaaaaaaaagcaccaaatattttaattaaacacaactcatgcagctgagttcttaagagtatagagtcaaacagatctaggttcaaaccccagctctgccattcattcattcattcttcctacaaagcctccattatatgctgagtattattctgggcattggggatatagctgtgaacaaagcaacctgcgtgctgggtgcacctgggcaagtgactgagtctccatttcctcatctgttaaataggaacatggaagccatcccataggcttgctgaaataattcaatgacatagtaaacacacatacacacacacacacgcacacacaaaaccccaaagaaaaccaaaaggctgggtgtgatggctcatgcctataatcccagcactttaggaggtgaaggtgggagcccaggagttccagaccaacctgggcaacacaggaagaccccatctctaccagaaaaaaaaaaaaaaaaaaaaaaaaaaaagctggacgtggtggtgcatgcctgtggtcccagctacttgggaggctaaagtggaaggatcacttgaacctaggaggctgtggctgcagtgagccttgattgcaccgctgcactccagcctgggtgacagagagagatcctgtctcaaacaaaaatccaaaagaattaaatgacataatgcttgtgacactcagcccagggactgtcacataataggttctcaataagcaggtgctgctactggtcattagtgagcctggctccctgccccatcttctcctcttcttgtccttttctctttttgcgtcctggagtcctccccacgatgctggcgaagcccatagtgactgacgcgagcgacgtgggcacagccatgcaggccctgagcaatctcatgtggggtattcatgcctgccccactcccccaagggggcagctccttcagggcaggaattgggtctgacccatctctgcagatgtccccagcactcagttcacaggaggttgcaggaaaggcttggtgaataaatgaataaatggatggatgaacaccactgggcattcagcccctgacctttcgaatgcttcagaacagagctgccttcccagtggatggggagggtgaatgtcttctggttggcccagtgccctgtgctcccctcccagcccacccctcttcccgatgggactgggacatgacatggctcccgccagactgggagcctctccagggctgggcctggggccaactcatcatcaccaagttttgagcctcaggaaatgttgatgaggtcagatgcacgaacagagagcaaggctgtatttctaggatgatgagcataattacagtagtaataacaggaacagctcaggttgatggggtgcctactgtgccagacacacctgaaccatgcagagaagtgttaaatgggacacggtagctgccctactgggaggattcaatgaagcagtgcttatgaaacacagcccggctcaggcaatgccaggctctcaaagcaggtgctacccaccactagtgagcccggctccacagcccacgctctgacccactctcatggcctccacctagggcggagggagggcaactgacccagctgtccctggttttctggggtgtgagacaattctgataaacaaaaagaaaataagagtcacctgtaatcccagcacccagggatgatggcggggctatgaaccaccacgatgcccttctgttaggcacctcctctgtgtggaaggcgtgattcaccctcgtggccactctccctttctctatttgtttccttttagccccaacctcgagtgcacatgtcctgtctgctgagactcatgctcggcacccgatgtgtgatttcactgaatcctcagcacagggaccccatctgctgggttctcttttggaccccacacccagcacggtgatacacagtaggtgctcgatacgagcacgctgcgaggccggtggtagggggcagatgggccacaccctgtgggtattagtggctccatttcacagatgaggaaactgagctctgagggggatgggcttgcccaggtcacacagcagggaagcatcagagccagacttgggtggatccaactgtgggtttccaacaccctgggatgatggagaactgggcgcctgccccgcccacggtcttaatactccttgcaggtggggaccctggcccccggccgagctctcccagctgacagacgggctcagaagtcaaggatgtgtttgtgaaagtccctcccctccaagctgccccccacctgcagggtcacttaccagtttgagtgagaacttttgcttctgtggtcctgagtcacaggtgagggtggaggtgggtgcagctgtgggggaacaaacaagggagtgaggttataaccacgcggaaggtcagggtcatcatccccaaacttcccagcaatgagaagcggctctggtgccctggttccaacaaggtcaagcgcactcttggctctcacgacttgctgcttcctagttttaaataagcttcttcttcctctttctctctgtcactatccagccatgcaggaagggctaatgcagcaggcctgagacggctctcctggcaaggtctgggaccctggattccgggagggctcccagaatcccctaagtgagtggggctcgctgagcctaaactgcttgtgcaatcactgtggtttctgtgcaacacctgctttcctctggggaacctgggatgcggatacatgtcagacagagggggccacatgactactccccaataacagccccgagcactgagcctctgaggaacttcctggtggacagttcccatgtactgtcacagcctgtggctgggcaattaggtgcgtcctaggcagagtgacttcatccaaggccacatcccagggtgacccaggtccagtgactgattgaggtggacataaaggcccagcctctcctggcccaacacggacgcacgctgaaggaccacttttgctccagagccctgcagggtcggctgaggccatcactgggctgcatcgcagcccacctcctgctccttaccccctccttgggttctgatccctgaggcagctccccataagcaccctgcatgcttgtcccccgacagagcctgctccagtagcccttactgttcatttacagacctcaccacgtctctggccctgtgctaagtgtgggcttcacatgcatggtcccatctgacagatgagaagaggagagaggccaagaaacgccaggctgacccagggttcaaatcccagctcctccatctgctctctgtatgactttgggcctccatttgcatgtctgtaagatgggagcagtaaggcctaccccgagactggctgcaaggactcaacaggctggcaggagtaagagcagcaccagcgatgtgtgcagcaagagtctgcatcccccttcacgcacactgctcagtgaacccactcagcccagagcccagcacggaccctggcacatcaggattgctccacaggtggtggccttaaaatatccccataacaccagggctccccagccggggagtggcagagctggctcaacctgggtctagctaatcccaaagcccatgagttgagctcttgtcgcccgcacacctgactcacgctggtgtccctccttcctctgttctcatcgttcccactctcccttcatcatcgaggctggtatcgtctaagacactgagctgagggatggggggtgacaaagtcacccagaagccatccttgccctcaagaagctccagctggaacagggttgggagccagctctacacgttcaaggccaagggtgctctgagcccaggggaagagagggagacgtatgcaggacccgcatctcggggaaagaaaaatcctttccagctgtggggagagcactggggggatcatgctggagcaggctgtgacatcatgaccaagcatccgcccagctctggaacccaggcatagtaacagtgcctgtctctcagaggcaccatgaggttaatgacaatgcgtacgtgcccggtactcagaggcaagcaggaaaagctggcaatttgatacaattttataatctgctttgcagattataaaaagcttttctctttcacttttctaactggccctgcagccaacagcctggaaagctagctgggcaattttcattgtagagggagccaagggaggccagaagggaaaaggggcttggccaagggccccagcagagacaggccacaagcccagggctctagactctgtgatctagggtggcagatccaggtttctgcttgccggaaacctgacaaatggaaagtctctacatgtgccaaatgaagaccagggcgtggcatgcaggcaggtgagcacctccccttcccaaaggtcagctggtcctgaacttggagcaggagcactgttctgggacccatcctgaccctaacaccagaaagcacatatacggcagtggccgttttcccggcatcactctactcatttcactctcctgactgcagccctgtgagggcagtagcattaccatctcccctctgcagatgaagaaactgaggcacagggtcatgctgtcattcgaaaggtcaagcgacaagcggcaagcagaggcagcccagcccaccactgagctccagggtgccccatgccttccacctccccaggccctgctggggaccctgactgacttctcccctccggcctccagaaggaatcagcagagccaacacctaaacttcgtacccagtgattttggacttctggcctccagagctgtaggagaataagcatgtgctgtgttaaaccactcactgtggtaacttgttacagcggccacaggaaactaacacaagccccacctttcatctgcaaaggcagaagctgcagagggcagcgtgggcccgaccctgagctgctgctcacgggcagctctcccaagtgcaccgcagtgagcagccgcacggattcatgtgactgatgacggatggtggttctcccctatagctcagcgaggcccgggatatatgacattatagttcagtactggacagagacacaagagttaataaaatgcttagagcatggcgcagagagtggggtaaagtgtccactgctcgaataaccataacgattcagcttgttcttgttgttttactgttattgctttaaattacgggacatacaactccaccatctcttcttgactggtgcaaactggcagaagaaaagggcgatttgctctggggcgatgtcacccaatggtggtgtgtccccaaatgcaagctccgcatcagcagggccttcaccagccccgctctccctgcactgtctgtgctggcaccgcggccagacacatgaaatggtaggtgctgcttaaggatccactgagcaaccgggcacagtgctcacgcctataatcccaacactttgggaggcagaggcaggaggatggcttgaggccaagagtttgagaccagcctggccaacatagtgagatcgtctctactttaaaaaataaataaataaagggactgctgaaggaatggatgactcacacaggctgggcactggggtttgctatttttatcaaacaacctgagtcatataagggaaaaccaaaaccacattggcccagagtagctcctcctgtgcttccactgtgggtttctgggggaggtcaagcgtggtttcttctctcaggagctcctggctctgtgtgttttcctctccttctccctcttccttccccgccctcctgccctctccccaccctgctctctcacctcaatctctttcttactgttggttttcatccttctccctttctcctccctctgtgctcctcggcccctcattccttctcatcatgatcccttctcgctctttctccctgccctctccttctcctttctctccctttcttgggagaagccagagtgcctgcgttcaaatcccagctctactacttccaggctgtgtgcccttgggcaagtagcttcctctctctgtaccccagttgcaggatggggtaatatgggtgcctatctcacagtgtggctggcagcattacatgggtaagacacagagagttcccaaagtgtctggcatgggatcctgcctgtaatcccagcactttaggaggctgaggcgggaggatcgcttgagcccaggagtttgggaccagcctgggcaacacagtgagactgtctctatttaaaaaaaattaaaaaattagcctggcgtggtggcgcctgcctgtagtccaagctactcgggaggctgaggggggagaatcacttgagcctgggaggttgaggctgcagtgagccgtgattgcacaaccgcactccagcctgggtgatggagcgagactccatctcttaaaaataaaagtgctggcacaggtgagtgctccctaggtgttagccacggccctctttctcttgctcctgcttggtcttggtcacactctttcccctctccctcacctttcctggccctgcctatctgtccctctgttattaacactgcctacctctgcctgggaaggaccctgtacagttttccaagtgcttggcctccatctcctatcatcatttgagccaacagccccaggagacaggggacaaggcgtcatctcacttttccagtggaggacatcaaggcacagagtgcctgggctgtttgctggggctccctcagtgtgtcggagccaagtcaggactcagattcggggctgtctgaaacaccagctgtcctgcccacctgcccagacttcaaggcagggatggccaacggaaggctcaaaattgtctacgtgcctgtctggccagcaggcacttccaattcaaagatttcctattgaaatctaggtttcaagcttttcctggaaaacttggaagattctggagcccagagcctaataattcacatctctgggatccatgttcctcatgtataaaatggggatagggatagtactgacatcctaaggctgcggtgagaatttagcaaacctctgcccatcaaataacttgtaagcaaatattcatggcagcgttactcataacagcccaaagcggaaactacccaaacgcccatcagctgctaagtggctaagccacatggggtgttcccatacagcagaatatcacgcagccataaaaggagtgcggcagtgacgcgccacagcatggatgcaccttgagcacacgccgctgggtgagggatgccagacacaagaggccacacagcgcaggactccacttctgtgaacacccagaaggggcaaatccacggagggagaaaggcggttagtggctgccagtggactgggggaagaatcagagtgatggctcagaactactgggtttctttttggggtgacagaaacgtcctggaattagatagtgacgatggttgcataacactctgaatatcctgaaggccactcagttgcaccctttaaaagaatgaattttcgtggtggctcatgcctgtaatcccagcactttgggaggctgaggtaggtggatcacttgaggtcagctgttcgagaccagcctggccaacatggtaacaccctgtctctactaaaaatacaaaaaataaaaataaaaaaataaaaaaatttagcccggtgtggtggcatgcgcttgtaatctcagctacttgagaggctgaggcaggagaatcgcttgaacctaggaggtggaggttgttaaaagccgagatcgtgccactgcactccagcctgggtgacagagcaagactctctctcaaaaaaataaaaaataataaataataataataaaagaataactttttgtttgacatggagtctcactgaataatttttttttttgagacggagtctcgctctgtcacccaggatggagtgcagtggtgcaacctcggctcactgcaagctctgcctcccgggttcacgccattctcctgcctcagcctcccaagtagctgggactacaggtgccagccaccacacccggctaattttttgtatttttagtagagacagggtttcaccgcgttagccaggatggtctcgatctcctgacctcgtgatccgcctgtctcggcctcccaaagtgctgggattacaggcgtgagccaccgcgcctggccaataaaagaataacttttatgtgagttttatctcaattaaaaagttccaaaaagaaaagaaaggaaaagaaaaacccatgtaaagtgcttagaacaggcctggccttgcagaagcactcaatatttattacagttaatactaatactactgccataattattttcctcattgtaacagagtctgagcttttcagccttgtgcctccctcctccccttccatcccacacctgggtgagcggatgagcaagcttgggtgctccctcctttggggtgtgcatccacgagactcaaaccatgcatggtgttggcccctgtgcagaaaccctgagcccagccccacccccaagcacgatgaaacacctgaccagtctcctttcctcactctcaaggcatctcagatctgtgtgggaggcctgcctgctctccacagagacccctattatgtaagcaataaacctctcacatcctcttggtgtgtgtgtgacatcatcagtctcgatgtttgaaccaaattttacgtggggatccatcctctctctgcacactggccagaacaaccatccttaacatgcagcccctgggcctgcactcccacgtgacaatagcaggtagcaggtggggtgaggaggggcacacttcacacagggcacatgccaactggccgcagtccccgccactcccaactgccttactccagcctgctgcactcattcccactattgcccggccctgcaggtgggtaggtatagagtccaaggtctaagagaaagttgcctagcgacaggtctgcagctagggatgtggcttccattcccattctcagaacggggtcccctcccactgtcctggtgctgagacgacccagtccctggccgcccatggacagagtgtaccttcatagagaatgccctggttgtccctggtctggaaggacttcagcttccactgtcgcccactcttgtctgtcagcactgtccctgtgggcaaagcttcaagtgaggtggtcactcggctccgcttcagcgtctgagggctctgcctggtcttctgagggctacagctggtcttctgagggctacccctggtcacctgagggctcttcctggtcttctgagggctgcttttgggggttgggggtctgctcccggagcctgcaggaggatgtaagaataaagtaaaagcaccatccaggagagaaaagttagatggggagtgaaacagcacgcaaaatactgttcctttacaaattcgttcattcaacaaacatttcctgggaccttctatgagtcaggcctttgtgtgatgatgttggggcaccagataggagtcggacctgcatccttccctcaggagtgcccagtttggtgggcaagtctgctctagacacagctagtcagatgcgggtctgagacagggcagtacagacagatattagggcccaaaagagaaagagatcctgcctggagaagtcagggtaggcttcctggaggaagggatgttagagttggatcttgttggatgaggagaagtttgccagggaataaaggacattctagacatttacccaaaaacatcctgaaaaaggactcagtcctgagatagaaaagggccaaaaaatttgttagaccaaagccctgccctagaagggctcctagcctggcaagagaatggggtgggtgtggtgggagacagacttggacacaggaaaagacatcgcttactctgttcctcccacccaccatcccctaaaggcaagtaatggcaagaggcctctgggcccagaggataatgaggagcaaaggggacgcctcacactgccactgtggctgtggcttcagatccaggggctcagtgaacaggagaaggaacatagtcctcaggcctcccgtgtcctgggcactggctgggcagagggtatatacactaattgtgctgggtccctacctgcaaagggcccccagcccagaaagtgaggccgaaagggatgtggagcctagactgacatgcgctccaatgaaggctgcagcaggcacgggggggcgccaaagaggctggaaagaggctctggcggacgatgaggaggtctggatgcgagcctatggcactcaagagaagcttcctagagaccagtatcggctgagtggcagtacacaaggccaagaacgaaggtgagagtgccctgggctgagggaacaggcttagcaaagaccaaggttaatccccaaaagtgttttctgggcaaagactgtgttgagggctaaagcaggaaccaggccacacagataccagactgaagagcttggtctgagggcaccaggaacagtaggggtctgtgtgcagggaggggccggggcagctctaggtgctgaaagacccatctggggccatatagaggcagactggagggggagatgggaggctggggaagctgctggagtcagagtccaggcagggatggatgatgtttgagccggggctgtggcagttttgtcccaaagatcatcagatgacctaactttgctccacttaagagtcaggccagatagaccttaactcttacctttggatctctcagaggaactcagagtatcttcagactcagaactgtcaccatctgagaagagggataatcggggagaggtgacggtgctggaccatttcactttcttaggagaggtttcaaaactggagttcagccctctctttgagcctaaagaaaggcagacaaaatgcagactggagttacaaaggcccctctgcaggcaccattggactgggagccctgaggttatactcagctatgctgttctctttggccctcaacaccaattcttgcttcttctattatgtaaatatatgagcaaactgttccttttagttgttctctccttcttaggtctttgcctctcttgtatcttccagcactttgccactctgtgtcctttccacataatgtctttatatgtatgtatatttgagatggagtctcactctgttgcccaggctggagtgcagtggtgcaatcttggctcactgcaacctctgcctcctgggttcaagcaattctcctgcctcagcctcccaagtagctaggattacaggcatgcaccaacatgcctgtaatgttgctaatttttatagttttagtagagatggggtttcaccatgttggccagactggttttgaactcctgacctcaagtgatcggccagcctcagccttccaaagtgctgggattacaggcatgagccaccatgcctggcctcttccatgtaatttcttaaaatctatcttccagttaactaattctcccagctatgtctagtctgctgtttaaaccacccaccgagtttctgattacaataattattttatatatatatacacacacacacacatatacacacatacaatgattgtgtgtatatatatacacacatacacatatatacatatatagacacacacatatacatatacacacatacaatcattagagtttttatttggttccttctcttatttgcctgtgcaactttaacctattccttcattatactttcaatttgttattttatttatttaaatgtattaagcatgctttgtaaacattctcatctattaattctaaagtctgtggtcttggcaggtccgattctgcagtttgttgtttctgctgactctccagctagcttatttcctggtgtctttgtaaatcaacagagactggtactcatgatccttggatgttgacctgtggtaattccctgatgtttgtctttaaaggatgttttccaagagaagatttgtttatatcaggcagggagtggtacccacatctcaccactttaagttaaatgttcagcttgcattttgggggaccacacagatcagtgtgaattctggccccaaactggtgagaacgtgaattcttggttaggaactctccaagaaggctgggcgtggtggctcatgcctgtaatcccagcactttgggaggccagggcgggtggatcgcctgaggtcaggagtttgaggccagcctgtccaacatggtgaaaccccgtccctactaaaaatataagaattagctgggtgtggtggcaggtgcctgtaaacccagctacttgagaagctgaggcaggagaatcgcttgaacacgggaggtggaggttgcagtgagccaagattacaccactgcactctagcctggatgacagagtgagactgtgtctcaaaacaaaaacaaaaacaaaaaacaaaaaacaaaaacaaaaaagggaattctcaaagaagacattcctcctttatttacccaccaccaaggcgacaaatgtctccaccaattttctgtggaacaattgcttttgttgtagttcacccactgaggagccccagatttgagaggaaatttccaattgcaactcctgtactgctaaggccctaagctttgtctcctgcaccccaataaaacacaggctcaaggccatcagcaaacagccccaggacaaataacacctatgtaacacttgcttagccctgtggtctctgttttcctgttgtttctcatctccatggactccccttactttcctaccacttagctctatattttaaaaggacattttaatgttttattccacatatttgggcacactgaacaataaggagtttttattatcatctggtctgccatattgctaaaaacaaatgtcctttctttttagttgacactgactaactcagccagcatggttggtccctgggctactggaatggcctcctaactggtttccatgcctcgaatccattttccacacagagaagccacagaaatctttccaaaatgcaaagcctattgtgttgcctacttggtagaagctcttccgcagctctccacgtcaccacagttaaaaccaaactccctcccatggtcctgcctgtcttcccccaggcagaaatgttcctcactcctccagcgtgtagttaaaaccaaactccctcccgtggtcctgcctgtcttcccccaggcggaaatgttcctcactcctccagtgtgtagttaaaaccaaactccctcccgtggtcctgcctgtcttcccccaggcggaaatgttcctcactcctccagtgtgtagttaaaaccaaactccctcccgtggtcctgcctgtcttcccccaggtggaaatgttcctcactcctccagtgtgtctggctcccctcgcctcacctctgctccccataccatgtcccagtggctggaacacatgtgccaactcccaccttgctcattctttttttttttttttttgagacggagttttgctcttgttgcccaggctggagtgcaatggcgcaatcttggctcaccgcaacctctcccttccgggttcaagcgattctcctgcctcagcctcccgagtagctgggattacaggcatgcaccaccacgcccagctaattttgtatttttagcagagacagggtttctccatgttgtttaggctggtctcaaaactcccgacctcaggtgatcaggctgcctcagcctcccaaagtgctgggattacatgcgtgagccactgtgcctggcccattcttcttcatccctagctcagctcaaactttacccacttagggagatcttccctgattccctgaaaagcatgttcccttatatatgttccagggtccattcagttcccctctgttatcatgcaacctgctgataatcatttattcaatgtctgttgtcttactgagagaccagaaaccagggctgtctcatttcttactataatcctcgggacaaatacagcacctcagcacatggcaggttacccatacatatttgccatctgatgactgatggagtgaataatgaactgggctctaggttagcattaggaaaggcaggggttgggttaagaactgactctggccgggtgcagtggctcatgcctgtaatcccaacactttgggaggccaggagtttaagaccagcctggccaacatggggaaagccggtctctactaaaaatacaaaaattagccaggtgtggtggtgcgcggctgtaataccagctactacggaggctgaggcaggaaaatcgcttgaacctgggaggcagaggttgcagtgagccgagatcgtgccactgcactctagcctgggcgacagagcaagactctgtcttaaaaaaacaaaggccgggcgcagtggctcacacctataatcccagcactttgggaggccgaggcgggtggatcatgaggtcaggagatcgagaccatcctggctaacacggtgaaaccccgcctctactaaaaatacaaaaaaatagctgggcgtggtggtgggcgcctgtagtcccagctactcgggaggctaaggcaggaggatggagagaacccgggaggtggagcttgcagtgagccaagatcgcgtcactgcactccagcctgggcgacagagcgagactccgtctcaaaaacaaaacaaaacaaaaaaaacactctgactctcaagttgggccaaggcaaacgctgttcacatttgcctggaactgtggagatgaagaagtcaacttgagacctcaaggcagtaagcatgggaacaaaagccatatgctaaggatggctcagtgcaaagacagaggagcctgggtcccttagggcatcatggggacaccatcccaatacgcactgtccccttttagtaagaaaaatattgctctacatacttgccagtgaaagaaaagaagaaataaacctaatcatttgtttaaacccttgtcatagcattttctgttatctgcagctaaacacactcccaaatgataaaatgaatgtcacttgactccccgccatgtatgctgactgccttctgcacaactgtccgatggataaaccttctttgatttaccaatatagtatctgggcttgggccttccagtgagcaagacctactactgatatttaattaattcattcaaccagtcagtaagatttctcagcacccaataccatgccaggcacagacccaggtgctgtgcaaacagcaggttacaaaaccacaatcaacacaggttacagaaacacaaaaagtttctgtccttatggagcttacagaagaagcaatccaagcaaaataatgtatttaatagggttgagacaagtaccaaaaagaaatacacagcaaggaagggggacaggatcattgcatagagggaagatgcaactttaattagtagtggtagggaaagtgtctctgagaaagtaacaattgaataaatatctgaaggcatggctgggcgcagtggctcatgactgtaatcccaacactttggggggctgaggcaggtagatcacttgaggccaggagttcaagaccagcctggccaacgtggtgaaaccccatctctactgaaaatataaaaatcagccgggcatggtggtacatacctgtaatcccaactactcgggagactgaggcacaagaatcacttgaactcgggaggcggagattgcagtgagctgagattggggccactgcactccagcctgggtgacagagcgagactgtttaaaaaaaaacaaagctgggcatggtggctcacgtctgtaatgccagtactttgggaggccgaggcgggtggatcatttgaggtcaggaatttgagaccagccggccaacatggtgaaaccctgtctctactaaaaatacaaaaaatcaactgggcttggtggcaggcgcctgtaatcccagctatttgggaggctgaggcaggagaattgcttgaacctgggagacggaggttgcagtgagccgagatgttgcagtgagccaagattgcgccactgcaccccagcctgggcgaaagagcaagactcagtctcaaaaacaaaaacaactaaaaacaaaacctgaaggcagtgaaagagtggggcatgcaggcccataagggaagaggcgtccaggagggagcggcaagcgcacaggctgaggcccaggcgtgctgaggtgtggaggggcagccaggaggccagtgtggctggaatagcaggagggtcgggaggtggggtctgaggggaaatggggacctggtcccttcacctcacttggggaagtatgagcagaggaatgatgggctctgactgtattcacaggatctctctggtggctgcgtgaagacgactacagggacaagagaggggagcagagggcaagaaggcttctgcataagagaggtgaggaccagggatgtgggaggtgcggagaaggaagtgggctgatactgcactgattgtaaagagggagccaacaagatttgctgaaggggtgggtgtgtcacggggtgcgagacaaagagaactcaaggatgatccccagggtccggcctgggaaactggatgaatggagtgctattcatggcaatggggaagtctagggcaggcggcaggaacaccaggagctcaggtgaaggcatgttcagactaagatgtgaccaggacatccaacacaggctgagcatcccaaatccggaaatctgaaatgcaaaatgctccaaaatctgaaactttgagtgtcaacaggatgctcaagggaaatttcactggactactgtggatttcagattttttttttttgacatcgagtctcactctgttgcccaagctgcagtgcaatggtgcaatctcggctcactgcgacctccgcctcctgggttcaagcaattctcctgcctcagactcccaagtaggtgggattacaggcatgcgccactatgcccagctaatttttgtatttttagtagagatgagatttcaggatgttggccaggctggtcttgaactcctgacctcaagtgctctgcctgcctcagcctcccaaagtgctaggattacaggcatgagccactgtgcccagccagatttcagatttttgaatcaggatgctcaaccagtaagtataatgcaaatatcccaaaatctgaaaaaatccaaaatcagaatacttccagtcctcatcatttcggataagggatactcaacctgcaggtgccaagctggcaggctgcacatatatctcctccaagcaggggagtccaggctggctggagatagaaatgaaggagatgttaacatggagacagtgttcaaagccatgaggccaataagaggccaagagactgatggtagacagaggggtccagtcctgaggcctgggcttctccagtgtcaggacagggtcagacaggctgcaaaggcatcctccctccgcagacacacacgtgtatgcaccttattcccaccgcagaaacaggctcaatgctctggttcttaccttggaaggatgacacatgtggattgacaaaggtctgggaccctacatgctcctctacaggcaaagaatttccacagtaggggcagaatttgaatgccgcttggatacttttgccacagtctggacagaaggagatcatgctacaaaacagaatgaacaaacacaaagtgaaacgggccagctgaaggtcagtggaagtattgttgaactgctcttaatcacagggtgagtggcaggaggcacaaccagggtcttcaactgtttgtgatgttcacttcttaaaacatgcaatgggaatgggagtgacagtcaatgttccccaaatatcaatatgctcccctatacttcccaggttcccttgcagcaaggtagaggccacatgactaattctggccaatggggtgtgagtagagtcatctcatggccgaggcagttaggagtcagaatacctcctctgcctccccctccacctgcagggatggccctggaggccatggctcccaactgacatagcaagatgaaggagggctgcctggtccacactggaacctcatgatcaacaaatacacttctgctgtattgagccaccaagatttcagggtttatttgtcatggcagcacagcctattctatcctgactaatttagtagaatgatgagtgttcactaaattactctctatgctttgcatctctctgagctaattcctgatactttttaaaagtccaaattacatactgagactatgacaaatgaggatatagaagagttttaagccagttaagtgaagaagggaaattaacaaggatgaagtacaacaggcagtttgtattgcccttcattatggcagtgctatttgtaacgagcatctaacaaagagcaatacgccgggtgcggtggctcaagcctgtaatcccagcgctttgggaggccatcacaggcagatcacctgaggttaggagtttgagaccagtctgtccaacatggtgaaaccctgtctatactaaaaatacaaaaaaaaattagctaggtgtggtggcatgcacctgtaatcccagctactcaggaggctgaggcaggaaagttgcttgaacccgggaggtggaggttgcagtgaaccaagatcatgccattgcactccagcctggacaagaagagtgaaaactctgtctcaaacaaacaaaacaaacagcagcaacaaaaaaaggccatttatttgttcttatagtctcaggcttactgtacattagcaattaaaagtgaaactattggccgggcacggtggctcgtgcctgtaatcccagcactttggaaggtcgaggtgggcggatcacctgaggtcaggagtccaagaccaacctgaccaacatggagaaaccccgtctctactaaaaatataaaattagccaggcgtggtggtgcacgcctgtaatcccagctactcgggaggctgaggcaggagaatcacttgaacccgggaggcagaggttgtggtgagccgagatctcaccatcacactccagcctgggtaacaagagtgaaactctgcctcaaaaaaaaaaaaaaaaaaaaaaaaaagtgaaactattgaaatagaagttaatataaacatgggcttgtgatttaatttcaccttgaaagagaatattcatttttaaatttttttagagatagggtctcactctgtcaccagggaggaatgcagtggcataatcatggctcactgcagcctcaaactcctgggctcaagcaatcttcccaggtagctggaactataggtatgtgccaccacaactgactaattttttaagttttttttttagagacggggtctcactatgttgcccaggctggtctggaactcctggcctccagcaatcctccggcctcagcctcccaaactgctgggattgtaggcatgagctaccaccctggctgcaagagaccattctgatcaaacccttttcctttattcactgtaaaggctggcttctgttgcaaatgcaaacagtggagtccttaaaatcacaggtttggccccaggctgccagatttcaatcccagatctgctacatgctgggcaagctacttaacctctctgtgtcacagtctaccccactgtaaaatggggcttctcccagctcctatctgatagaatggtcgatgaggtctaaatgaatacatttatatgaggtgctgagaacagggcctggcccatagaaagccttttatgttagtgcttgctgtgaccatatcatgccttgtacccaagttactatattccagtcattaatatttctattcttccctttcttctttgataggaagttctgagctcctcaggcctgtctatttcctctaggtactgacttttgaaattatagagcttgtccttaaaaaccacaggccatccccatcagctggtgaaagaaatctcagccacatgaggagagaaggggtcctggattccttttcctcaggctgcagaagagcagaaacactctgtggcataaatctgcccttctgttttttcaaacaaaggagtcatgtaagacatctggactgcaaaggctgttggtcaagtatcttttactctctagaaagccagtcattctaacttaagttagccagactaacttagtgatttgttgtcctgctaataatatgtaaaataacatctctttctcaaaggcacaaatactggtgagcatttttgtgaagctagaggtctcactgcctcttccctctctgccaggcaaacctgggtgttgacactggtgtcacaagaccaaattgcctagatgtacccaataaatatatacacctactatgtacccaggtaaattaaaaattaaaaaaaaggccgggcgcggtggctcatgcctgtaatcccagcactttgggaggccgaggcgggcggatcacgaggtcaggagatcgagaccatcttggctaacacggtgaaaccccatctttactaaaaatacaaaaaattagctgggcgcggtggcaggcgcctgtaatcccagctactcgggaggcttaggcaggagaatggcatgaacccgggaggcggagcttgcagtgagccgagatagcaccactgcagtccggccggggagaaagagcgagactccgtctctaaaaaaaaaaaaaaaaaaaaaagaaaaaaaattaaacaaaaattttttcttttctgagacggagtctcgctctgtcacccaggctggagtgcagtcgcgcgatctcggctcactgcaacctccacctctcgggttcaagcgattctcctgcctcagtctcccgagtagctaggattacaggcgtgggccaccatgcctggctaattaaaaatatatgtatttttaaactgtatagaggctggtgcctggaaagttgtattagcgagaaataatgtgtgattgtgataaactactaagatttagaagttgcttgttgctgaagcctagcctagccagactgtacacttcttttttattttttagcaacagggtcccaccctgtcactcaggctggagtgcaatggcatgatcatggctcactgcggcctcgagctcttgggctcaagccatcctctcacctcagtctcccaagtatctgggactacaggcatgtgccaccatgcctggcctttttttttttttttttttttttttttttttttttttttactttttgtagagatggggtcttgctatgttgccctggtctcgaactgctgagctcaagctcaatcttcctgccttggcttcccaaagtgctgggattacaggtgtgggccaccatgcctggtctagacttcttatgtgaacaaagcgtttgtttagaaatctgtgatggttttatttattttgagacagagtttcactctgtcacccaggctgcagtgcagtggcacgatcttggctcactgcaacctccgtctcctaggttcaagcgattttcctgtcagtgtcccatgtagctgggactacaggtatgcgctaccacacccagctaattttttttttttttgagatggacttttgctcttgttgcccaggctggagtgtagtggtgcaatctcagctcactgcaacctctgcctcccaggttcaagcaattctcctgcctcagcatcctgagtagctgggactacaggtaggcgccaccatacctagctaatttttatatttttagtagagatggggtttcaccatgttggccaggctggtctcgaactcctgacctcaagtgatccacccgcctcagcctcccaaagtgctggaattataggcgtgagcctccacacctggcagaaatctgtgatggttttacacggcttcgtgttaaatagaatttccccagatgctgactgccctccaataaagatgcctccaggatgcagcaagtgcctaaccaggtgagccctgccatacctatgacaacgttccttctgggagtaaagctggccagcagcaacccagaggagacaagcaggagccagctgctggtgggaaaaaggaaaaaggtcttgagaggctgtgcccaagggataatacctttatgaggtcacggtctggcccttggatttactgggttggaaactccatcttgacagcgacctgtaagtgaacaaaagtggagaggctgactcatgctttcacatagaaatgaaagataatggctaatgtttactgagcactggccatgtcaccagcatgtgccaaatccattcgtttattcatttactctataactattcaccgagtttcctgtttatgccagccactagggaaacagcagcaaaggaaacaacacagcccctgtcttcaggatgcgcacgttctggtgggggaagagacactaacaaacaaatgagcaaggaaccgctgaacaggtcagatggagaaagggctatggaggacaataaagtaccatagaagaaaacaggatgccacagaggttggtgggtcactattcacacagggtggccaaggagggcctcgcccagagggaggcatctgagcagagacccaaaggaaaccagggagcgagctgtcaatatctgggaaggagtcctcaggcagacaactttctatgcattatcctgtttagtctatacaacagcccaggacgcaggttccagaattatcaccacttcataggagagtgtggcatttgtattttccaaagcaggtcacatgactatttctggtcctgtgtgctctttggaaccttgtaacccctcctcccaggagtcagggtctctgttcctccccctttggatctcggcagagctgtgactgctcctaccaatagaggaccggcagcagtaaggccatgagacttcccaggctgggtcataaaaaacaacttgcacctggctggctcgctcaggatgctcacccatggaagccagtttccacggcatgaggcagcctaaagtagcccaggcagagaaaccacatggagaggctcaggtggagaggaactgaggcccctggccaacagccaccatcagctgctgggtgagtgggcaagtcctcagaccacttaaaccccagccttcaagtcttcctgctaaggcacaggcactggggagcagaaacaggccacctcactgtgctcactctgaattcctggcccataggatccatgggcacaagaaatggtggttctacaccagtgaattgtgggacgatttgttctctagacatagtaaccgggacagggagtccctgctgcacagagaggtcaagtcactcacttaagacggttctcatttcatgacagttcagtatgtgcagaccactgtgctaagttctcggcaggtattatctacagaaccttcccaatcacccttttcaaggtaagaatgatttcccctttggggagatgagaagcagaggctcagagagcaaatgacttgcccagggccacaaacctcttaagcggcgagccagacacatgattttgtttaatctttccctccactctatgaggtagggatgattatcccatctttgaaacctacaaaatgatgctcaaagggtgacaattctccttcccccagacctgactccactcacctagaaaacagtggggacgcagctgaaatccagaacccaaaagcccatgttcttcacctggtgccaatttatacaacgaaaacgcaaaaccggactgggttcttggggcagcaggtcagaacattcttgtagatttaaatctggaagctgatgttgggtgtggaaccacggcaagagagtcttttaaccatgtgccacccccggttctgacaccgtcaccagcctggtctaggccaccatctctcccttgtgctactgcagcagcctcctaactagactttcggcttctacgcttgtccctacaatctattttcaacccagtagcttgacggatccacttaaaatctaagtcagaccctgtctgtgtccctgccctggcccatatggtgggtcggacacggtggctcacgcctgtgatcccagcactttgggaggccgaggtgggcggatcacgtgaggttaggagttccagaccagcctggacaacatggtgaaaccccgtctctactaaaaaagtacaaaaaaaaaaatcagccgggcgtggtggtgggcacccgtaatcccagctacttgggaggctgaggcgcaagagtcgcttgaacctgggaggcagaggttgcaatgagccaagattgcaccgctgcactccagcctgggcaacagagcaagactcagtctcataaataaacaaataaataaataaaatgtaagtcagaccctgtccctcctctactcaaaaccgtatggtggatttcattttagacagaataaatgctgaaattcctaccatggcccaggagccccctgtatgatctgccacttccctgttccctctctgacctctcccacctctccccttgctcacgctgagtcagccacaacagcttcggtgcttttccccaatcgtgacaagaacgtttcttccccaagacctttgcacctgctctcccatctgcctggaacgctgtccccctaagagtgcacacagttaacttcctcatcacattctttagctctctgttcaaatgtcaccttctcagagaccttcttggacacgattttactgtgttttttcttttcttttttttgagatggagtttggctcttttcgcccaggctggagtgcaatggcacgatctcggcttactgcaaactctgcctcccgagttcaagtgattctcctgcctcagcctcccatgtagttgggattacagatgcgtgtcaccacgcctggctaattttatatttttagtagagatggggtttcaccatgttggccaggctggtcttaaactcctgacctcaggtgatccccctcagcctcccaaagtcctgggattacaggctcgagccaccgtgcctggccctggacaccattttactaatagcatgttttatcctccttaccttgctttatttttcttcacagtgcttgtcactacctgacatactctgacttactagaatgtaagcttcatgatggcggggacttttccctgccttgtttgccacagtgtgcccagagcctcaaacaggcctggcacagagcaaatgctgggtctacgtctgctgagtgaataaatcattgtctcctttgcaaaagaaaatgtgccaagaaggtgggtggggggggtccccagctgtgtcagtacacattcatctctcaggcaaatctagacatccagccagagactcaaagctcagggccggaattatctagctggatggtccctaaaaaagacgtgccacttagaagcagatcagtacaggggttaagaggataaacttgggaaataatctgcctgggtttggatcttgcttctgccatgtattgcatgatggacagagttttgctatgtcacccaggttggagagcagtggcacgacctcagctcacttgcaacctccgcttcctgggttcaagcgattctccctgcctcaacctcccgagtagctgggattacaggcgcatgccaccatgcccggctaatttttttatttttagtagagatggggtttcaccatgttggccaggctggtctcgaactcctgaacccaggtgatccgcccacctcggtctcctaaagtgctgggactacaggcgggagccaccgtgcccagccaaattttttggattttagaacctattacatattacaacaccggcgagatccaggggcaactctccataagtatatgatttgcacaacaaaatctttaaaaattctaaatagtcacacatcagttcagagtgggtattgccagcaaacaagttcaaagccaggtgaggttggcctgccaagtaagttgcaaaacagagaaaaagacctttcagttttcagaacgttttggattttaaagttatagataagggactgcagacctgtaaatattctttaacatttcttttttagtgtctggcatccccaaccaccctgagaatgtgaattagctgggcaggatttttgttttagacactgctataataacctgggcttgaacagtgcctattagactagcaccgttcaaacccaggttatagtagtgtaatatcggttgcacggagccttccatatagtaaacgctcaataaaattggatgtgctgaagtcacctatgcaatggccaggtcaggacttgaaaccctaagactccaaccctcaggccagtctttatcttaatttatttgacttattcaacaaatgtttagggaacagctgctatgcgtcaactactgtatagtgttcctcctagaaagttcaggaaacagcacagcaaaaaggctaaaagtcagaccccacctcagcgcaggtggggcgattgcctaggcgacgacagagcctcccttcggccgcacctccatagaaaccacgggatgacttagacgccaagtttcacagcggaggagctgtcgaacttcccacaagttccgcccatctccgccttagccatgcccaacacggagcccaaggtggcttgggaagctcaagaggaggccagtgaaccccgcgacccggagccgctctcattccgaaccccgacagcaggggcctccgcctcccacaaacggtcgtgctgacgtcacggacgccccggccgagctgcggctagggggtcgggggacgtcccctcgttcgcctcgcttcccctcacctctgtacttggggactggggtgggattctgggcttctgcagcctgaccctcggatcctccgcagttacccggactcaccttctcagttgcccagcgaaaacttccgctgggcggagagcgctgcgcgcgcatcctgaatctgaggcgcccgcgcaggcgccgctgacttcctgacggcccctgggcttcgcctgcctgggaactccgtttcccagatgcctccgcggcaggcccgccctctgattccagacggaatggggattattccctcattgctcatccccctcccctccgttctagccgctttggaacgccttctggttctactgcgcatgtgtcagtgtcagaccaatcggaatgcaccgtgaggtacctctccaccaatcagaggtcacattacctaaacttctgcctcaactccgccccttacttccgcttgttttctcagaaacccgtcacaacgcgtttccatggcaacctaccgcttgctcttcggaaaaggttaacactccctgacttctagtaaaggcaagaagctaattagatgattctttaacaaggtaaaaatctggactacaaactgatgccgcctggtcctgattctctttctactctactcccacagtgctaaggctgaagaagcaggaggagatgggaaggcgaaagaagtcgcccgcacagccctctgggaaatagagtcctggcgctgccgcggaggatcctgggtgcagccgctcagagaagcttctcgcgcacaggaagtcgctgcgaggaggcgcgtgtgcggggagttgaatctcccgctcccttgaggctggggttgcgtctgttgacgcggccgactacaatcccgaggtacggagacgctggggctgagggacttgcgggctcggtccttcctgagaggtgacggaatgcaagtgggggcgacttcggcaaagggtgcgtcgccttgggcggcggttgtcagggtgaaggtgtgaaccgtctttcacagtctgttatgaaaaccgctcaaggtctgggcacggtagatcacgcctgtaatcccagcactttgggaagccttggcgggggggatcacttacagccaggagttcctcgaacccccagtctctactaaaaatacaaaaattagttgagcgtggtggcgggggcctgtaatcccagctactcaggaggctgaggcaggagaatcgcttgaacccaggagctggaggttgcagtgagccgagatcgcgccattgcactccagcctgggtgacagagcgagactacatcttaaaaaaaaaaaaaaaaaaagaaaggaagaaaaccaccttgggaggctgaggtgggcggatcgcttgagcccaggatttcgaggctagcctgggccagatggtgaagccctgtctccacaaaagaagaaaaaaatagaaaaattagccgggcgtggtggtgcgcccctgtattcctagctaattgggaggccgaggtgggaggattgcttgaacccaggaggcagaggttgcagtgagctgagaaagaaaagaaaagaaaagaaaactgctaaaggggtttccaggcctccctgatggccctgagaggagtggttctgttttattttggttttggttggggaaggaggggaatgagttacctgaagttggcaaatttaggcagaatcttgctggacgatggatgggagttcttcgggaagttgaagtacttaacatttacagtatttgagtgctttctgtgtgccaggcgccctgctggagttgcatttcctcttctgatccccgcagcagcactgagacataagtgcaggtccccttggcaccaaggcaatctcgggaatcagaatttttcagattttagaaagctaatagggtgcatattttataattaggcagcacccccccacaccccgaggaatctgggccagtttttggtcataaaatgtttctgtggggcaaggtgtgaatattcacacttatgagaacattaagaccctacatggcctgtggcaatccaggtgaagttttgcggtcagtttataaatcaagttctggtttttggagcatttaaaggaccatagatctgttgtatttgttccatttggtacatgtggaaactaaggcttagagaaggtaaatggtctggaaggaagggcaagactcttgggcccaaggtctctcagcctgataattgtttggcttaagtcactctgggctggatgaccttgggctccacctctgggccctcgtttctttcctcccagagctgagagtatatgagatgtgggcagaatgtgatttggtaactgcagacagggatctcaagctcagctgtctgtgagggccaggcagatgacatacaggaaagaagagaactggtccaggtgaggctgcggggccttggggagcacttgcctcatctgaaggggagaattgtgttttttttttgatgacagagtctcgctctgtcacccaggctggagttcggtctcactggaacctccacctccccggttgaagcgattctcctgcctcagcctcccaagcagctggaattacaggcgtgcaccaccatgcctggctaatttctgtatttttggtagatacgggggtttcaccatgttgatcaggctggtcttggactccaaacttcaggtgatccgcctgccttggcctcccaaagtgctgggatggcaggcatgagccactgcacccagccgctttttaaacttaaatttaatttttttggccgggtgtggtggctcatgcctgtaatcccagcactttggaaggccgaggtgggtggatcacgaggtcaggagatcgagaccatcctggctaacacggtgaaactccgtctctactaaaaatacaaaaaattctccgggcgtggtggcaggcgcttgtagtcccagctactcaggaggctgaggcaggagaatggcatgagcccgggaggcagagcttgcagcgagctgagatcgcgccactgcactccagcctgggcgacagaacgagactccgtctcaaaaaaaaaaaaaaaaacaaatttaatttttttttggaggcaggatctttctctgtcattcaggctggagtacagtgacacaatcatagctcactgcagccttgaactcctgggctcaagtgatcctcctacctcagcctcccaagcgatcctcctacctcagtctcccaagtagttgggactacaggcacgtgccaccacaacttgctcatttttaattttttttttttagaaacaaggtcttgttacgttgcccaggctggtctcgaacacctttcagcctcccaaagtgctgggattataagcatcccccacttgcctagcactggtgggggagctttaaatgggcaccagtgaactaacttcgtgggatgtagacccaatgttgccaaatcctaggatgtttcagaagttggaaacataatttttaggtgaaatttcccaattttcaagtttgagactagtgagccatgcttgaattttctttcaaaacattctgtctgccaacaaacattatgggccaaatatctgtcaactgagttatactcgtaggttgaggcttaacctctgacatgtagaaaaactcattgttcagtagaattagcatttattgtaggtctaccatattcccatatttgtagtctcaaaaatctggacaactcagaacaacaaattttttttcataaatttagtgtccgtgccttacctgaactactacagggtattttttaaatataactttaaattattctacctagaatgaacgatgatacttttctctagggtaaagtgttcaattatgaaatgcagcctgatccacactgcgctgggactttgttttgttttgtttttgtttttgtttttgagacggagtctcgctctgtcgcccaggctggagtgcatggcgccatctcggctcactgcaagctccacctcccgggttcacaccattctctcgcctcagcctcctgagtaactgggactacaggcgcccaccaccatgcctggctaattttgttattgtatttttagtagagacggggtttcaccgcgttagccaggatggtctggatctcctgacctcgtgatccgcctgccttggcctcccaaagtgctgggattacaggcatgagccactgcggccagccctgcactgggattttaatgaaatatgccatgtatatgccatatcaccttttgaaaataaaagttgaatttcaaagcacatctggccttggagtttgaagaatttgtggacctgtgtcattgttaagtgatccgtgctgctttgtgatatgaaatgctttcagcactccgcagatatgtgctacttggtccacgcagtggatacaaatgggtaaaaatgtctgtggtacagttttgcgtattatgggtcatgaaaataactaggtgggcagtgactatgattttttaatgaagtagaataaaagagactagaatagaaaacatcccagtgcatcttacattgcagggtaagtattgcttcatgaagcttttgtttagttacactgtgtgtttgagtagtcatgatactttttttttttcttttttgagatggagtctcactgtgttgcccaggctggagtgcggtggcaccatctcggttcactgcagcctctgcctcccgggttcaagtgattctttgcctcagccttccgagtagctgggatcacaggcacgtcccaccaagcccagctaatttttgtattcttagtacagacggggtttcagcatattggccaggctggtcttgaactcctgacctcaagtaatctgcccacctcggcctcccaaagtactgagattacaggcgtgagctactgtgcctggcctattctacatattggtggtgttactgtgggtcacggttaaaacaaaagttgaaatatttctgttgtagagatagtggccaggtgcggtggctcacaactgtaatcccagcactttgggtggcccacgagggcggcttacttgaggtcaggagtttgagaacaacttgggcaacaagtgagatcctgtccctacaaaaagtgaaaaagattagctggatgtggtggcacatgcttgtagtcccagctgcttgagaggctgaggttggaggattgcttaagcccaggaaattacagctgcagtggcccatgattgtgccactgtagtactccagcctggcaacagagcaagaccgtgtctccaaaaaagagtaacagtttcggaggccaatttacctgaactcaaattccagagatgataatcagaaatcccagaagcattgttccattggttctttagacaccttcgttctgtcaacaactgtaggtacttttacacctactgttaaagcacctactgcgtactaggcaccatgctggtgctaagacacagcagtgagcaagacagaagctcccactgtggccatagactttcatcaccaaatctcctaaacatgtgctgactgactgttaggtgctaacccaccattgttggtggcgaagctgttctgtaggttctgaagcacagtgcaaatgtggggctgaggtggcttcagtaaatatagttgttgttgtcccctgcagggagactcacattgggacttgtcctcctcctcctggacattttgggggctcgtcagcatggacagcgagtcagccatgggtggaagggaggctttctcacagctcccttgtgcttcccacagccctgccagccgggaacacggaggggaaggaggaggagcttaaaagaggctactgaaccccagttggccatggctgaggtgagttgaaggtcgctctgtcctaatcggtcacacccaaaggcagaaaaattggccttcctttgtggccgaggcgagttgaaggtcgctctgtgttgattggtcacccccatggcaggaaagctggccttcctttgttttggcctccctgtcccatggtggctcccaggcgatcttttttaaaggaaagctcgcatgctgttctttcctgtttgtactcttctgggaacccctattgcttatagaataaattccaggtttttcagccttcctgtgtgttctggcttctaccctctttgcaccatcttctgtcatttctctagataacaaatactccctttggcctagtagtaaaagttgattctgtactttccagcagcttcctttgctcaggttgggccctctgctggaattccctgccccttttccatgtggtagtgtctcacacagcctttaagacccggctcagttcccccacccttccctaggcagtcagcactttcctgctctagccttccatagtaccccctgctgcctccactgtagcacagatccacctagatatggatgttcctgcccatatctgtcagccccaccagactagatgctccttggggacaggaactgatggggattcatctctgggtccccagggcccagcacaggccaggaacacaggaagcctcatgaggtgttagttgaatgaatgaatgaatcaatgaatgatgcatgaaaccatctctctatctggtaaatatctgttcatccttagtgatccaacttgaatgaccttccctccaggaagctttccctgacctcaaggcaatggcctccctctcccccttggcccacacagtccccgatacctccctttgccacagtcctacctccctcgtgtctctccgtcagaccatgagctccatgaggccaggaaacaggtctgacacacgtccatgtccccagtgcccacaatgtggtctagcacacagggtaaatgattgccaaatatgtgctctgaccttgtcactttcctgtggctccccagtgcctcaaggatctagtctgccccgtcttcccacctccttcatcactgtgacaggggccttgtccagcgcagtctgggagtgtgaggaaaggaagcccctcaaaggtcctctttgatctggctcctgcttggctgctactcttgacaggatatagacagcaacagtttctgttataagtaccagaaattgacttacgcagtcaggagactattaattatataaccaaaagtccagaggtagggctgtcatgatctgcaggtgtgactgggactcagtttattgtccccatcttgaacctcacttagtatgggttccatccttcatgagctccttcccttgtcccaaaacagctatcaggaccatgtgctgctttgcctcattcaacaagtatttactctgtgcctgtcatgagtgggctttgttgtaagtctggactagggaaacggtttaggtggttcctgccctcatgaagcttactttattgcgggtgacagtgtatgagcttgctagggctgctgtaacaaagtaccacacactgggtggctgaaaacaacagaaattggtggtctcccagtcttggaggccagaagtctaagatcagggtgttggcagggctggatccttctgaggctgtgagccaggcctctcccctgtgttctggcagatggtggccagctttggtgttcctcggcctggagaggcatcacctcaatctctgccttcatcttcacaggatgtcctccctgtatcttcacattgtcttccctcagcctgtgtttgtctttgtgtccccatttctcctttttataacaacttcagtcgttttggattaggacccaccctgatgacctcatctcagcttgatcacctctgtaaagaccccatttccaaataagggcaaattctgaggtactgggggttagaacttcattgtatctttttagagggttacagttcaacccataccacacagtaaaatgcattaagtaaatcccatagaatgcaggcagtattaaggattatggaggaaagggatagggaggcccagggtagatttgctgttttatacagaggggtgggagaaggcttcatggagaagaggcatttcagcagagaactgagggacacaatcttggctctaagatggggtctggcaggtgtgttcagggagctgcaaggaagctggtgtggctggagcagagtggatgagcaggaaagggggagaaggtgagccctgagtggcagctggggccagatctttagggccctggagatcattgtatggtctctgtctttaaatatggtgaatccggaggccgttggagggtttggagcagaggagggacaggatttgttgtaagcggaaacaggatcccccttgctcgtccacccaattcctgcttagcatcaccactgggacgactgtttcagggtcttactgctgctgtaacaaataatacaaacttgtgggcttaaaaacaacacaaatttattcttttacagttcttcaggtctgaatcccaaaatgatctcacggggctcaaaccaaggtgtcagcagggtgcgttccttctggaggccctagggaagaattcagtccttgcctctcccagcttctggaggctgcctatattcattggctcctggccgcatcactctaatctctgcttctgtcatggcatcacctcttttctcctgtgattccttgtctccctcttattaggatccttgtgatgacatttaggaccaacccagataatctaggataatctccccatttccagattcttaatcacagctgcaaagtccctttcgccatgtaagataatattcatgggttctgggaattaagacagggacatctttgtgtggggtggcggcattattcggccatgacaatctacaggatatctcaaactttacatgtcccaaaccaaactcagactctgtcctgaaagctgcttctcctatgtctcagtaagtggcaactttgtccttccagctgttcaggctaaaaacgtagagccatcccagggtcttctgtctttcacaccctccatgttattcgtcaggaaaccttgtcagcaccgttatctgaatatctggaatctcaccacttctcaccccctccattgctgccaccatttctcacctggattatcaaactggcctttttcctttgactccctgcttctgcccttctcaccttctgtcttttcccacgaagcagcaagaggaggatgctgtttagtatatgcctaatttaaaaaagtttttttattgtaaaatcacaggtgcagaaatgcacacacatcaaatgcatgacctaatgaaggcgaacgccacctagatcaagagtgagaattttttttgccatccaccccagaagtccttcgtgggctctgtcatagccctctcgcatccccaataagtaacctgatttttatgattaccacttgctttattactcaaatgcacaatcccttgccccttcttgttttttaatgtcttctgtgtctcttaatctttgggttcctcctccatccccttctgttctcagctgttagttagagaacagttattcggtcctttgaggaactggcatggttcgacctgtagaattcctcagtctgttttctctggttccatccttgtggtgcagttgagtttattcccagttggcagctaggtccagaggcttgattagactcatggtcaatccttttaccaagaatctcttgtgccccctgtttgtggtcctggcagatagtgatgctttctgccttatcacctgttcattcatcagggcttgcaaaatggcgctatcatttcttttcatgtattagttggaacactttacaagacatcctttggctgggcatggtggctcatgcctgtaatcccagaactttggaaggctgaggtgggcaaattgcttgagctcaggagttcaagatcagcctgggcaacgtggtgaaaccccatctctacaaaaaatttaaaaattagccaggtgtggtggtgtgcacctgtagtcccagctactcaggaggctgaggtgagagtatcacaggagcccaagaaggttgaggctacagtgagctgtgatagcaccactgcactccagcctgggtgacagtgagaccctatctcaaaaaaaaaaaaatttatctactatttgtctagtcgacggtagagttcatataggacaggtagggtaaatgcttgactctccttttatttgctagttttcactataaggaattggtttccttctgtcatgtcatccttcagaggtgaccagttctttcatacgtgtgtgtgtgtgtgtgtgtgtgtgtgtgtgtgtgtgtttggctgttcttaagagttttacaaagcattttcattgtaattcaatgtaacacacccaggttaaatctcataaggacaggaactggctgcccccttttttcctgtacctagcacaggggctggctcgtagtaggtgcttggtcatcattggacagataagtagacaacaagcaccacttatttagcagcttcttagtgagttgggtctctgctgagccctgtgtaggcatcagctcacttcatcctatagcagccttattttagagaagaggcaggctgagcattagagaggtggactaacaaggtcccacagttaatagatagtagaactagaatttgaactgggacctgtctgactctaaagctgagcctctaacaggtcagcctcctggggattgtgtagcagatgggagctcgtgccaccccaccacctactcaccgtgtgctgtggttggaatgtttgtcccctttgaaactcttttttttttgagagggagactctgttttctaggctggagtgcagtggtgtgatcttggcttgtggaacctccatctcctgggctcaagtgatcctcctacctcagcctcccgagtagctgggactacaggtgtgcactaccacgcccagctaatctttttgtgtttttggtagagatgggggttttaccatgttgcccaggctcatctcaaactcctgagctcaagcagtctgcccgcctcagcctctcaaagtgctggaattacaggcatgagccaccatgccccaccaatcgaaactccttgaaatttaatccctaatgtagctgtattaagaggtggggcctttttttttttttttttgagatggagtctcactctgtcacccaggctggagtgcagtggcgcaatcctggctcactgcaagctctgcttcccaggttcatgccattctcctgcctcagcctcccgagtagctgggactacaggtgcccgccaccatgcccagctaatttttttttttttttttgcatttttagtagaggcggggtttcactgtgttagccaggatggtgtcgatctcctgacctcatgatccgcctgccttggcctcccaaagtgctgggattacaggtttgagccactgcgcccggccaaggtggggcctttaagagatgattaggtcatgaaggctctgcctgtgtgagtgaattcatttattcatggaataatgggttatcatgagagtgggtctgttgtaaaagccagcttgacattgcttcagttccctcaccatgttatgcgttgtgccattttagggctctgtagagtctccaccagcaggacgaccctcaccagaggcagtctgttggccttggacttcccagcctcgagaactataggaaacaaatttcttttctttataaattacccagttatagcaacagaagatggactaatacactgtgtaacttggagaaagtgactatttgggccttgattttgttttctataagttggggataatcctgcctcaaagaggagtcaggcagttcagtgactcactgcacctaaagcattgaaccattgccggcatgcagaaagctgttggccaaagaagggcttttgcagtcagatgcctggagggttgggatgggcagtgtaagccagagtggaattgcccctttgtcgagctcttcctgtgtgctaagtactatgcagtcacctcccagcagtatttcagttgcttcttgtagcagccctgatgagatgggactcgttggtcccatttcactaggggagcaggaattggggtcacaagagacatgcagcttacttgccaatagtcactcataaagggaaggtaatagggccatacctcagacccaaactaaagagaggtggttttcattctttcttaaaatgtgcctgtgcccacactgatggagatttggaagagacacatcagtcatggtttcacctagagatggggtgtgtgggggcaggctttcacgttttaatgttggtacttctcaagtatttgaatttttatcctaaacatccattaactgtccaggtacagtggctcatgcctgtaatcccaacacttcaggaggcaggggcaggagaatcacttgaggccaagagttcgagaccagcctgggcaacatggcaagactcctactctaccaaaaaaaaaaaaaattagctgggtctggtggcacaagcctgtagtcctagctacttggaagctgaggcaggaggattgcttgagcccaggaggtggaggctatgatcgtggcactgcactccagcctgggcaacagagtgagacactctctctctctctcgctcgctctctctctctgtatatataatatatataatttatggattaccagatttataaattaccataacttacaaacgacagaaggaaaccaattccttatagtgaaaactggcaaataaaaggagagtcaagcatttaccctacctgtcctatacgaactctaccgctgactagccaaatagtagaaaatttttttttttttttttgagacagggtctcactgtcccccagggtggagtgcagtggtgcgatcacagctcactgtagcctcgacctccttgggctcctgtgatactctcacctcagcctcctgagtagctgggactacaggtgcatatataaattataaattataattttataaatttataaatttataaattatatatataattatatataaaataaaatttaatatatacatgcacacacacataaataataataaacacttattaactaggaaagtcttaaaatgaaagatggcatcactaaaagttggacaaccagataggagccttgggtaaccatgtgttacccaagcggacctggtacctaaagcggacctggtaccacctgtgagtgggtctttcccccagaagctgtattgactccagtcaggcctctgctctcctgaccagctcacaggaaatgcgtggccagggagcagccaggtgacactgcatggaagcagcttgccacactcagaacatgggacctcaaatcaggagcatggaggatgtagaaggcacagcggtacagctgtagatttcaaaacctcagaaccacatcagttacagggtatgggccccctggattctgattgagacgagctagctataaagacacaccactgagatgtcagactaatctgtatacagattttgaatgtggtctaggtgttcagtgattaaggagttactgttcatactgaagtattcacaggtgaaatcagatgacccctgggtgatgagttcatgggtgttaattatatacatctctacttgtatgtatgtttgaaagtttacaaaataagtcttgaatgaacacttaaagcaaaagcgtaaaatagatttttaggatcaggcagacctgggttcagtcccacctgtgttaacttcggttgacatcctgtcccctggtcaaagtcaaggtccttttctttgcctacaaaatacaggggtttccagtctcttacatctcaagattcttgtgaggctgaggatgggatggtttttgccaaagccctggcagattgagggctgggagtgccctgagtgagctgttgggctcctccctgaccccagcctctgagtgaccaatagtgtactgtgtttcaggaatttgtgaccctcaaggatgtcggcatggacttcaccttgggagactgggagcagctcgggctggaacagggggacacgttctgggacacagcgttggacaattgccaggacctcttcctgctgggtgagtgttgcctgtccccaggggcctactcactgccctgcttggtgatcacccatgctctctaccacccacagggtgaagtcctggctcctgggctcctcagaatcagcatgacctagcccagcagttctcagctggccgaggagacattggcaatgtgtggagacatttttgattgttactccttgggccagcgcagcgtgccgctagcatctagctggtggaaccaagggaggctgccacacatcctacagtgcacagcacagccccacaaccaaggattggcccacgccagtgtcagtagtgctaagcctgggaaaccctgctctggcccctatctgcctccccagccttgtcttcaccactttcctacttgtagtcagtcattcttcaagctgatacttcaaagtcttccagttgccctcccctctgcctaagcggctctcagggcttacatttttaaagtttaacctgggaccctgttagaactccatacctcctctcctactcatcttgtctgtcgctccctcacgttctaactaccattgtatcattcagagcgggagctgtgtgaggacagggcgtgtccccagtgtttggaacgaacagtacctgctctagggcccagcagacagctctaaactaatgaatgattgagtagcagctcttaggacttgcttgttcaatcctccagtcaccccatgaagaagctgggttgtccctcttttgccgattggtctgaaactgaggttaaaagagtggcagtcaccttcccagctgtgtcagtgtccccaggagcacccacagattcagtgattggctaggattcccaggactcatcctgtagtcagactcatggctatgacttactacagtgaaaagattcagagcacagtcagcaaagggaggaggtacatggggcaaagtccaaggaagccaggcacaagcttccagaattctctcaggggagtcacatgggacatgcttaattcccccagcaatactgtagaatgtgatatcgcgtgtgaaatgctgtccaccagggaagctcatcagagactcagtgccagggtttttactgggggctggtcatgtgggctcctctgcctggcacattccaaaattccagccccccagaaggaaagcaggtgtaagccaccgtgtttgcacagtttaggtccagggagcgtgtctcttcagttctggagacacggggtacccccctgaaatccagccttgccagcaggcttttcccaggagagcagccagcctgctgtgtcgccctcttctgcacaccagtgtcacacagtgagacagcagcagggcccagactccagctaaggtctgtgcagctccaaggccatatcaccccagctccccatcagtgtcacctgattaactcattttccctctctgttgcctcagttctttctttttgaagaaccagaaaaataatttactccaaaagatgaaagaagtaaaagataacacacggtggaaactatcatttgatagaatctcatcacattggggcagactttctccagactggccagtgtgtgctaagaagcatctcgtgggaggtcctacctcagtgtctttttgaatttttaaactacagcccacagtaagaagtgtgtttacctcgactgccccttcacccatttgtgtgaatgtatgagtagtgtatccgtttcctattgctgctgttacacataccacaaacacagtggcttccaccagcacacttttattatgttacagtcctggaggccaggagttccaaatgcatgtggctgggctggaggcgaggtgttggcagggccaccatgttccttctggaggctccagcacgtagatagtccttcctggcccgttgccagcttctggaggtcacctgtattgcttgactcatggcttctcagtcttcaaagacagcagtggcgttttctccgctgtggcctgtatccctcctggatggtgactctgttcccttccttggggaagcttgtggagggtatggctcaggactgcttgggctctgggaccctgacattttctgtccctggcccatggaggcctcaggcaatgtgtggcccatgggtcagtgaataaatcatgaatggctaaggaagtacgtgcctctccacctggcagatcctgcccattaaagagctgtcacaagtcctttgtatccccagccccagctgtcacagctttgatcaccctggattgtgattgtttggctccctctccatcactggactgggaaccctacaggacaggcatccccagagtcgcccagtgcagcacctcgtccacacacaggagccacgtgcaggataaagcatagaaaagtcaggagagccaggaggttctcactgagtgtctggatggtcctccatgtcctggttgggtgacaatgcttttctctccctgcagaccccccaagacccaacctgacctcccacccagatggcagtgaagatctggagcctctggcaggaggaagcccagaagcaacaagccctggtgagtggatggagaggggccccttgtgtaccttctgtcttccagacctccatcctgaggctgcagccagctttcccacaggtctaccgagacattacaacgctcagcttcaggacttcactctgcttctcgctggcttccatccccttgtcctgggagctggggggatcaggacatttttatagaccctcactctggggtctctctaccttgcccttcagcacagggttatcctggtgcctctccacagctcctcctctttccttccagactcaacaagggtacgccctccactctctcagttggtctctctactttcctgccttgtgctccctgagtgtgttgaccctcattctacttcttttacctcctttccttcaggcccatttttccttcctatccctggggcatagcagatggccacatcagggagtaacttaagcccaggcctgaatgctgccaagagcatctgccctgccatctcccaagccggggttcctccaggtggatcaggttaggtggtgaggattcctggggtattacccatggtagagacgtccccagcatgagaagcagggccctgaaccagagaccacaggaatctcaggctgtaccccatccagtcagtctgcagctcccttcttggctcaccacgctcaggctcgtgtacatgaggcctctgcagcctcctcttcagcacatcagtgttcctcataggtgactaactcatgcacaggctctcacaacttctgctttctgtttctgtcacctcagcatattggctgtttccaaacataggtagccatgcctttactaacaaatatacctccatatcctctagtagtgacacttgagttgcatagttaccacataagcgtctttcccctttaacagcatgccgctcttggaagcagggcttagctgattcaccctgtattcccagctcctgacatcatgcttggcatataaggggtgcctattacatgtctgttggtgcatttgaggccgagggaacaacatgagcacaagtgtggtgaggagagtgagctggatatctgtgggagagatgagcagaggcaaaggtgacaattcagaacaagatgtggtttcagaaggctttcatttgcaagttttaattccaggcagagagactttaagcagtctcatagatactcagatggtgagccaagaactgcacaagggacaggctggaaaaggtatgatgatggaggagaggagagatggggagactggaggcatacagcagagcagtgacattcatgttttgtgaaggatcccagagagcatacagcttggtagttaagaatatgggggccaggcgtggtggctcatacctgtaatcccagcactttgggagggcgaggcaggccggtcacttgaggtcaggagttcgagaccagcctggccaacatgctgaaactctgtctctactaaaaatacaaaaattagctgggcgtggtggagggcacctgcagtcccagctactcgggaggctgaggcaggagaatcacttgaacccaggaggcagaggttgcgttgagctgagatcgtgcagcacttcagcctgggcaacagggcaagactcagtctccaaaaaaaaaaaaaaaaatatatatatatatatatatatatatagtcagaggggttcaaatcctcagtcttctgctcacttacctgtaagaaagcagaaacgtgcctaccttacaggaggttgtcgagtgtaacagagtgcctgaggcactcctgcctgtgaacaagcataccatgaatgggaattactctgtcctgtgaatctttctcgtggccgcctctgtggcagtggatggatgagcagtggaaggtccccattaaagaacttaccttctggtaagggtcaggggtcagaccctttcataacctgttatggtagaggatggtcagtgctcagctggttttcagagaatacagggcaggggacttaaagcagaatggggatggggttgtcagggaagcctttcagagaagggtgataagctgggtattaaaagacttagaggagttagtccaggaagtgccatccagcatgagggaccattaaaggcacagaggagaaagtctggtggatttagggaaccgcaagagttctatgaggtcagcacaaagaacactgggctaatacactcatttcttttctccaggcaggaagccatggaagggtttaatcagaggagtgatatagtcagatccattaactacaaagccctttagggctagtgtggaagactagagagagagagagacagacaaacaggagaccaatgagcagcctggggtcagatgctgagtcagtgataaagagaggagaggaagggagttgagacatttcgatagagaccaaatgaaaatagtgccaagttgagggaggtagggaggaggttgactcccaggattctagcatggagaactggatggatggtggtgtggggagagcggggtgttgtctgggatagaggatgcaggatatgaggaggaagattttggtgacagtacaggatagagtggagagtagaagcaggtgagtccaggcgattttttagggaacttggtcagtcacttaggtgtgaaggtaatggtagaatctccctcctcgttgaaccctatggtttcccaactcccttcttgaccctcctgggaatgggctctgtctgttttctgtgatgccagttccacatgggtcacccctttgggtcccttgatggataggctggactcaagatctatcacccctacttgctcttgtctgtgttctcacccttagtgaacaggagacatttgcacttgctctttcagatgtgactgagaccaagaactctcctctgatggaggatttcttcgaagaaggattctcccaggagattatagagatgttatccaaggatggcttctggaactccaatttcggagaagcctgtatagaggacacctggttagatagtttgctaggcgatccagaaagtcttctgaggtctgatattgccaccaacggggaaagtcccacggaatgcaagagtcatgaattaaagagaggactcagtcctgtgtccaccgtttccacgggagaagattccatggtgcataatgtttctgaaaagaccctcacaccagctaagtctaaggaatataggggtgagtttttctcctactccgaccacagccagcaggattctgttcaggaaggggagaaaccatatcaatgtagtgaatgtgggaaaagcttcagtgggagttaccgtcttacccagcactggatcactcatactagggagaaacccactgtccatcaagagtgtgagcaaggttttgaccggaatgcttccctttctgtgtatccgaaaactcacacgggctacaaattctatgtgtgtaatgaatatgggacaacttttagtcagagtacatacctgtggcatcagaaaactcacactggagaaaaaccatgtaagagtcaagatagtgaccacccacccagtcatgacacacagcctggtgagcatcagaaaactcacacagatagtaagtcctacaactgtaacgaatgcggcaaggcttttacccggatcttccaccttactcggcaccagaagatccacactcggaaacgctatgagtgttccaagtgccaggcgaccttcaacttgagaaaacacctcatccaacatcagaaaactcacgctgcaaaaactacctctgagtgtcaggagtgtgggaagatttttaggcacagttcgctgctcattgaacaccaggctcttcatgctggagaggagccttataagtgtaacgaacgtgggaaatccttcaggcataactctaccctaaagatccatcagagggttcacagtggagagaagccttacaaatgcagtgagtgtgggaaggccttccaccggcacactcaccttaatgaacatcggcgaattcatacaggctacagaccccacaaatgtcaggaatgcgtcaggagtttcagccggccctcacatctgatgcgacatcaggccattcacaccgcagaaaagccctatagctgtgctgaatgcaaggagactttcagcgataacaatcgccttgtgcaacaccagaaaatgcacactgtcaaaaccccatatgaatgtcaggagtgcggagaacgcttcatttgcggctcaaccctgaagtgccacgagagtgttcacgccagagaaaaacaaggattttttgtgagtgggaagatcttggatcagaacccagaacagaaagagaagtgctttaagtgtaacaaatgtgagaaaacctttagctgcagcaaatacctaactcagcacgagaggattcacaccaggggagtgaagccctttgaatgtgaccagtgtgggaaagcctttggccaaagtactcggctcattcaccatcaaagaatccactctagagtgaggctgtataaatggggtgagcaagggaaagccatcagcagtgcctcccttatcaaacttcagtccttccacacaaaggagcacccttttaaatgtaacgaatgcggaaagaccttcagccacagtgcacacctctcaaaacatcagttaattcacgctggagagaatccctttaaatgtagtaagtgtgacagagtcttcacccagagaaactaccttgttcagcatgagcgaactcatgccagaaagaagccgttggtgtgtaacgaatgcgggaaaacgttccgtcagagctcatgcctttctaagcatcagagaattcactcaggtgagaagccctatgtatgtgattactgcgggaaggccttcggcctgagtgctgagcttgtccgccaccagagaattcacactggagaaaagccttatgtttgtcaggaatgcgggaaagccttcacccagagctcatgcctttctattcaccggagagttcacactggggagaagccctacagatgtggtgaatgtgggaaagcctttgcccagaaagcaaatctaacacagcaccagagaattcacacaggggagaagccttactcctgtaatgtgtgtggcaaagcttttgtcctcagtgcccatctcaaccagcacctgagagttcacacccaggagacactttatcagtgtcaacgttgccagaaagcctttcggtgccactcgagcctcagccgccatcagcgtgtacacaacaagcagcaatactgcctgtagccattgggtggcagcagagtcccagaatatgagaccgttactcggatgttgaaagttggaaactatcccattgcaagtttctctccaaataaatgcatctaaagattgattagaaagtttgtgcgcatgtttttcattataacaatgaaaacacaaaagtggagaagctgtacaacgtcaggattcagaggtaggctctggagccagtctaccttgagttaaatcccacctctgccatctactacctaagtgaccttgggaaggtcagaaaaatctctcagggcctcggtgtccttatctgtaaaatgggcatcacctacctcagagggcttttctgaggattaaataaataaatgtgaagcacttagaactgatggccagcacatgagggctcaccaagtgtaagccacaaatacacatcagctatagcacaaatatacttgtgttacaagaaaggaattagtaatctgtgtttactgtagttaatgttcttacaatgtatcgcttttaatttaagttttccttttttacagtttttctccagcactttactcttcttaagtgcctggccttttttgtccctttatctctcctggtttttttcttaagccccagaaagccaaaaagaacatgtaaactcttcacctcaactagctacaaccttccactcctaacctcccaagcttctcacttaaagaggactccctatcccacaaacacatgctccctcttcctatgaccttcctccatttaacagtgttggttatgcaataagacacccaatttttcatgggagttgacaccaaaacacagctggattccatcaggaaagctgcattgatcagggtgttaaccgcatatgaaacaacccatatggaagacatacttaggggtcaaacctgtggtgtgtggaagtgaccactgggatgtcatcattcaccatttatccaggatggccgctcaccaggcaatttgctaggctcgggggcgggtagtatccatacactatgcactactgctctgaagcttctggaatcagaaatgaacccattttcatcgacgattgctgttagttgacaagtgacatcttgaaaatgccacattccctcatgtcacaggaagttctgggatcaccaaggattgttggagagtccagtgagatggaaccacacaaccagttccctaccagtgtcttgtcagctctgggtgtttgttccctgccactaagtggctcagtcacacctttgctgaaacacagtagtcttatgaaaagcactggacacatactttgaatacctttcatattttaggtgctgaaaatggtgagggagtgagtgctctgcacccttgggcttttcaactcttgcacctggagttctgctggttaagtttgttaaacttagttgaaactgggaacctgttggctaaccattggggccttacactgtttttcaaatggttgcaacatttaacttctcgcacatggttcccgtcctctggagctctgtcttgtcggggagatgggcatgttgtataccaaaagagtgtacaaagtgttgcagggctgtgacacaatagggactctatggaaaactggcagccattgggtgtgggggcagtctgtaaatcagtcacctgtgttgctgcaggccaaggtagaaacgccctccgtgtgtgcatatttgttggttctctgattaaagttttgagtctaaaagcattggttccttctctcagcctgctgccatgcagccacgcatcagtccctgcctgccaggcctcacgtctttgctggggagggcttctggtggcgatcagtaagagggagcagctcagttttcccactgtctgggcggggcatgcgccactgaggaggcacacaagttcagctggtcctcagatgcatcatcaaacaacacttttcagtctgtgtgtgggcctaagtaaccaaggagagagcacaggcagcctgcagttcactcttcacagacatgtcaggccccaggcttggggagtgtttctaattagcatccagtaatacatataactttgtttatactttaatttttgtccccacctttttcctttagtgacaagtgacaagagatactagttcctgctcatggtagtaatagaaagttttttttttttataaactgagctgatagggccgagtgtggtggttcatgcctgtaatcccagcactttgggaggcctaggtgggaagatgacttgagcccaggagttcgagaccagcctcaacaacgtgatgaaaccctgtctctacgaaagaaatatgcaaattagctgggtagtggccactgatcacttaaaaatgattaaaatggcaaattttatgtatatttttacaatttaaaaacatttaaagtttaaatttagataaaagtttaagtttagataaatttaaaacattttaaagtttgtgtggtaggctgggtgtggtggctcatgcctgtaatcccagcactttgggaggctgaggtgggtggattgcttgagctcaggagtttgagaccagcctgggcagcatggtgaaatcctgtgtctacaaagaatacaaacagccgggtgtggtggtacacgcctgcagtcaagctactagggaggctgaagtgggagaatcgtgagcctgggaggttgaggctacagtaggctgtgatcatgccactgcactccagcttgggcgacagaacaagaccctgtctctgaataaaggaaaaagatgtgattggaaaaagaaatgagctacaggagcctaaaccaagcaaggctaagatggcaaaacccaacacctctgaggctgatgcaaagacaagctcaaacgaggtcaaggtataaagcagcagcaaagtcttctctagggccaaggtctcccccaacatttcagagatggggaccccttgtcggaactgataccccagctaaattccagcttgacttctggaagggctggagactaaggtcagtcagggtgatcagccctgtcaacataaccaaccccataaccctgggtaccacggcgtgggtgagcttctctggcaacactttgtgtgcggtcacacatcattgctgagtgcgttaaatgctttccatatgactttactggcagaggacacctggaagctcacgcttggtctctcctagactccatcctatgcaccttttcccattgctggttttaatctctattctttagctgtagtaaatgcaatcaagtataacagctttgctgagttttgtgagcccttctaatgaattactgaacttaagggtccactgccctctctgagcctcagtttcttcagtggactcaagaatgatactcagtgtaaggattctcaaaacgagcatcagcaggttccgcccacgccggcctcctgggttcagttctctaataaccacctcccttccccgcctactccagccaatccttgtgctgactcggctcctggccacgccctaaccccacccccgctgcctctaaacccgtccccacccctgcagcctcacaggctgccgtcagattctcaagcccctattcctctcggtggcctaaatccccaactgctcggggccacttttcaggccaaaatgggcccaaaatggggagggcaagtgatgaatgtcactagacagtggggccctcaaggacctggcaaatgggggcttggacctcggatcggcctcccacgcgaagcttgctccccaccagcatccccacgttggtggcgacgctgccccggccccacggatacttccgcgcctgtcagactccctgatgaactacccttcccagagtaccgcgggagctcgggctcctgagggcgacggtcctctgatggcagatgcgggagaaactctggcgtcaggcggccctcgcgtggagcacacgaagtcgtggcttattctggcttcagtatgtggggtggagaaggcgatccacgcagctgcgtctatttcctgtggatcaatcgcaaaatacgttctgtaagccccgcccccactgcgtgcgggcggcttttgtctccacggcaaccgtcaactctggaaacgcctgtctttctccatggcaactgtctacgccgcaggctggagctgcccattaccggagcccgtaagcagtatgggtgctggacaaacagcgtgatcgggtcgtaaaacttggtggaaaacgaatattagagcacaaggaaggaaaaaccgggctgggtgggactgaaatagttgatgtgagggaagatttctcaaagggagactatttttttattgtttgtttgttttttacttttattttttcaagacggggtctcgctctgttgcccaggctggagcacagtggcacgatctcggctcactgcaacctccgccttccgggttcaagcgattctcctgcctcagcctcccgagtggctgggattacaggcgcccgccaccatgcctggataatcttttgtatttttagtagtgtgaaaaatgggaaagttattcttcaaagattataaaaagtcacaatttcttagtataagattgctatccactattatatattccaaatcagctgtcctagcttgctccggcatgcctggacagaactagacaagccccaggacatagtgcatagttaaggaagcatccttaactatcccctgggcaacttccttttctttgttctgttccccttacccagttaaaaaagttttaaactaatagccaatcgggtaaagtgtaaaatgtgaggtcctattccagccaatggaaactggacacagcagtagggtagacacatcaggttataataactctgtctccttagtttggcggggtctcgtggctggacagctattgagtagcaccctttctgcaggaagtaaagctcaccttgctgagagatcatttgttcccgcattaattcttttttttttttttttttttttgcgacaccaaaaacctcgttcccaacagtaggggtttcaccatgctgcccaaggctggtcgccaactcctgacctcaggtgatccacctgcctccccctcaagtgctgggattataggcatgagccactgctcctgtcccatgaggcggcctttgaaaaaggctttgagggatgagcaggaggtcgccaggaagagaagggaaaatatactatatctatagatctggccaaaattaaaagtctcaacgagggtgtgaggaaactgccgttctcctaccctgctggtagggagaggaatgtcttcagcctttgaggaagtaaatcagtcagtcagttggtgatgtttgctgagaaccttactgtatactgggcagacgctagggatacagcggggaaagacagagggcaggcagtaaccatgagacatgattggaaattataagtgctgtgaagtaggctgggtgtggtggctcacacctgcaatcccagcactttgggaggccaaggcgagtggatcacttaaggccaggagttcgagaccagcctgggaaacatggtgaaaccccgtctctactaaaaagacaaaattagccaggcgtggtggcgggcgcctgtaatcccagttactcaggaggctgaggcaggggaatcacttgaacctggaaggcagaggttgtagtgagccgagatcacaccaccgcactccagcctgggccacagaatgagactctgtctcaaaaaaaaaaaaaaaaaaaaagtgctgtgaagtaaacaggcaggggctgagatgggaatgaaggagggactgtgggatcaagaaacataattctttgagaacataatgtgaaataatataaataatatcaacctcaagagaaatgtagaggaatactatgaattgcagctggaatctgccctaaatgtacatttcttcttcctggtgtttgtgacaatttgagttggggttttcttttagtcacagctgaaggcatcctgatgtgctagcataaacaagatgagtgtcttgcttttgatgcttttagctactcaagccagtaaattatcattcttgtttgaactgtgtgagaggtggtcaagttcaacatttgaagggagagttgagagatactgagtgggagagagggataggaaaaacatgccttctttctgtttaggtttctaaggtgataggagataagcctggagctgctcgtggtcaccttgccaccatggggggagaacctgccagaaaatgaaactaaccaaaaaggaagctgagctaagaggagtgaccagattactgacatgtctcttaaacacctggatccatctgttcctgaaggcaaaactgttcaattacataggctaataaattccctttcttccttaaacaaacagaatactcttggctggaaatgaatctctatcttataccagaaattatttaaaaatccagatggatcaacagccgggcacggtggctcacgcctgtaatcccagcactttgggaggtcgaggcaggcagatcacgaggtcaggagattgagaccatcctggctaacacggtgaaaccccatctctactaaaaatacaaaaaattagccgggcgtggtggcaggcacctgtagtcccagctacttggggggctgaggcaggagaatggcgtgaacccaggaggtggagcttgcagtgagccgagattgcgccactgcactccagcctgggtgacagagcgagactccgtctcaaaaaaaaaaaaaaatcctgatggatcaaagttttaattgtgaaaaaaatcgtaaaagtactagaataaaatatagcagaacttttttttcataatcttcggggtgaagaaggcctttgttagcatgatagtagatccaaaaactataaaggaaaatacagatagattaaaatacctaaaaatttaaaaactctgtataacaaacataaacaaaattgaagagaaactgggagaaaatattagtcacttatataccaaagtgttaatatgcgtaatatataaggacttgccgttataaatcaatacaaaaaggcttctcaattaaaaatgggcaaaatacataaataggcaattcacagaatagaaaacatcaataaatacataaaaagataatctcacaaccaagaggacatttttacctatcagattaaaattgctttaaaaaatgactaacaccaagtatttgggaaggaagtaaagaacagagaaataggcactcatatacacttccaggagttgtgcaaattgtttcaccccttttggaggactatttagaaataactatgaaaaatttaaatgtaggtgttctgtgatcccacaagtatacttgtaggaattcattttgtacatatgtcaaataataaatatccaatgatggaaaagaaaatgaaagcaacttaaatatccattaacagggattggttaaacaaattaaagaaaccctagcatgaaatattacacagctgtgaaaaatgaagatacctatgcatgtatatatttttgtgtaatatgtacaatatgtatatattttgcattatcatgggaaagtatccacattatatcaagtgagaaaagtaacttcttaaaattatgtttgcatgtggttatgccatatataccatacatatgtgaatatatatacatataaagtcagtttcataaaaacagaaagggagatttcttatttatagaaaaagtatgaaatctttggaatgaagttttttttttgagatggattttgctctcgttgcccaggctggagtgcaatggcacaatctcagctcactgcaacctctgtctcccagcttcaagcgattctcctacctcagcctcccaagtagctgagattacaggtatgtgccaccacacccagctaattttttatttttatttttagtagagacagagttttaccatgttaatcaggctggtctcgaactcctgacctcaggtgatccacatgcctcggcctcccaaagtgctgggattacaggcatgagccaccacactcggcctggaacaaagatttacagggcactaaagatttcttcatttttgtatcatctgagttattcacaatgaatattacttcaatcatgaaagaagccacaaaagattaggagaaatacctgggcgataactttaaaatataatagcacagaagaaggctagtgagacatagccccatatattgacagacgttccagctgatacagaacttctggcaacccattggcaacatactcgaggtcacagaaatcctctccctatgaccccatgacctcactgccaggatttcacctgggaaatagttagacactcatccctttcataaaagggatgttccatactatatatatataaaagtcaaaagcggccaggtgtggtggctcacgcctgtaatcccagcactttgggaggctgaggtgggtggatcacgaggtcaggagatcgagactatcctggttaacacagtgaaaccccgtctctactaaaaatacaaaaattagccgggcgtggtggtgggtgcctgttgtcccagctactcaggaggctgaggcaggagaatggcgtgaacctgggaggcggaggttacagtgagccgagattgcaccactgcactccagcctgggtgacagtgaaactccttctcaaaaaaaaaaaaaaaaaaaaaaaaagtcaaaagctagaaacaaccaaaatgtccaacaagggactggataatatgctggctgaatatatataagctacgtgaaactgcaaaatatcaggttgttaaaggtgacttaatgatatgttaaatagctgacactcattgctataaaaatgtagtgcatccatggtccgcatgcccagccatggcaggtaggttaagttcagccctttggaaagcaatatggcaacttgtgtgagtaatcaggaaaatggctggaaccttggttcccatcattgccactgtgggaattttactttgaggaataatcaccccaaagggagagaggaagtgagcacggacatgttcattataacattatttgtaattgggataactggtgaaaaacccatgtcagtcaaaagcttaaagaagaatctaaatggagaatggatttgtaaattacaccttctcagtggcatatcattatccttaataatgataaaagtgtatggggacaatgacaatgctcatggcataatgacggcaaaaacggtctctgcattgtgattacaatgaaataaacttatatttgtttaaaagatttgaaaggaaatataaaaaataaaaacaatatgacttctaaggatggccaaattgtcagcgatggcttttatgttttcaacccaaaatttctgacaactaaacctatggatatgggatatagatttaaaaaaccataaagaggccaggtgcggtggctcacgcctgtaatcccaacattttgggaggccaaggcgggtggatcacacaggagttcaagaccagcctggccaggatggtgaaaccccatctctactaaacctacaaaaattagccaggtgtgatggcaggtgcctataatcccagctacttgggaggctgaggcaggagaatcacttgaacctgggtggcagaggttgcagtgagccgagatcacaccactgcacttcagcctgggcgacagagtgagactttgtctcaaaaaacataaagaaacacacccaagaatgactggtgagtctctctgagctgcagaattacagggaatttgtcttttatttcatacttctttacactttccaaattatcctttatgataagcatatggtatttcactaaatttttttctgttataaaaatatatggccgggcacggtggctcatgcctgtaaatcccagcactttgggagactgaggtgggtggatcacgaggtcaggagttcgagaccagcttggccaatatggtgaaaccccatctctactaaaaatagaaaaattagctgggcatggtggtgcacacctgtagtcccatctacttggggggctgaggcagaagaattgcttgaatctgggaggcggaggttgcagtgagccgagatcttgccattgcactccagcctgggtgacagagcaagactctgtctcaaaaaaaaaaaaatatatatatataattattaaatgaaaaataatactatgttttaaaaatatgactaaaagtctccccttgggaggtggggcttacagtgagccaaggtcacgccactgcactccagcctgggcaacagattgagactctgtctcaaaaaaataataacaaaataaaaaatctccccttgggcgtgaataaacagtgatgcttaacaacatgacgcttaatagaacaatcactttgtaggccgggcacgggagctcacgcctgtaatctcaacactttgggaggctgacggaggaggatcacatgaggccaggtgtttgagaccagcctggccaacatggtgtaaccccacgtctactaaaaataacaaaaattagctgggagtggtggcaggtgcctgtaatcccagcttcttgggaggctaatgtaggagaatcgcttgaacccaggaggtggaggctgcagtgagctgagatcatgccactgtactccagcctggtaacacagcaatattctgtctcaaaaaaaaaaaaaaaaaaaaaaaaaaaaataaataaataaataaaagaacagaacaatagctttgtaaagcatagatcctggaaacataataaacagaaacaataggacattaaaaatgtctataaatatgtgaaacatttatatttatatccatatttatatgaaacatatttattgtttaagccaactgcagattctgatatttgtagcttaaagtttcaaaggaaactaaaaatgttactttaaagggttaatctttatagctgtcttcccccattgaatattcaggctccagtttaagtttcttttttttttgagacggagtctcgctctgttgcccaggctggagtgcagtggcgcaatctcggttcactgcaagctccacctcccgggttcatgccattctcctgcctcagcctcctgagtagctgggactacaggcgcccaccaccacgcctggctaatttttgtatttttagtagagaaggggtttcaccttgttagccaggatggtctcgatctcctgaccttgtgatccacccacctcggcctcccaaagtgctgggattacaggtgtgagccaccgcgcccagctcaggctccagtataaggaaggatgaatcagtttaagaagcttggagagagctgttcttggtgaaggtcccagatgaaatggcatcccttttggaccactctctaactataccacgatctagggacatggcagggtggaggaaatatgcaagggaagcccccagaatgatcagaacctgtcgcagttagtgaaaaactgtgccaccttccctctagggaacaaaggaacaaaccatctcaacatatggcgccagcatccttctctggggagttcctagtgttgatgaagagcagattgctgaaaggccatttatgcacctggatccatctgttcctgaaggcaaaatttttcctagggttcctagtgttgatgaaggtgggatggaacctaacagcaggacagccagctcatcacacactcaggttgtctaatcagcatgggttctctgatgatcagcaagctgtgtgccccaagcaaaggctttctcaaaatcatcacagatgtaggcattctggccagtatgaagcctctggtgttcagtcaggtgtgaactccagctgaaaccctctccacactcctcacatgtgtagcgtttgctgccagtgtggaccttctgatgttggagaaggtgtgagatctgggtataggttctcccacagtcactacacttgtaaggcttctctccagtgtgaatcctttggtgttggattaagtggatgctctggttgaaggccttcccacattccttgcaggcgtagggcttctcgccggtgtgaatcttctgatgttgagtgagggatgagttgtgactgaaggttttcccacattccttacacttatagggcttctcgccagtgtggatcttctggtgctcaatgaggtgcgtgctctggctgaaggctttcccacactctctgccctcgtagggcctctctccagtgtgaatcctctggtgttgaatgaggtgggagatctgggtataggctttcccacacactttacattcatagggtttctcccctgtgtgaatcctctggtggtgtgtgagggaggagttctggctgaaggttttcccacactctgtacatttgtagggcttctcaccggtgtggatggtctggtgctgagtaaaggatgaggtgtggctgaaagccttcccacattcgttgcatacatagggcttttcccccacgtgagtgctctggtgcctcatgaggtgggaaatctgcgtgtaagccttcccgcactcgtgacacgcgtagggcttctcgccagtgtgaattcgctgatgctgggtcagggacgagctgtggctgaaggctttgccacaatcagtgcactcatagggtttttctccagtgtggactcgctggtgctcagtcagggatgagctgtggctgaacgttttcccacacttgttacatttgtagggtttctcccccgtgtgggtggtctggtgttgggtcagggaggaggtgtgacagaaggccttgccgcactctccacattggtagggcttctcccccgtgtggattttctggtggcgggtgaggtgggagacctgcgagtagaacttcccacactggccgcatttatagggcttctccccggtgtggcaccgctggtgtttgatgagggatgagctctgtgtgaaggccttcccgcagtccttgcctttgtagggcttctctccagtgtgaatcctctgatgctaggtaagcgaagagctctgagtgaaggtcttgccacatgcatggcaggcatagggcttctcgcctgtttggatgatgtggtgctgaatgaaatatgagctgttgctgaacgccttcccgcagtcacagcacctgtggggcttctccctggtgtgaattcgctgatggagaatatagtccgaatggtaaatgaaggctttcccacattccgtgcagttaaatggtttcttctccacgaacgtcctttggcgtttcaagctcttccagggcctgccccacttccggggcctgtctccaaagggcactcgttgcttcctgatgagggcagaggcctgccggaggcttctcccaagctcgttacacccaaggcctctctcccccgaggtgtctcccttgggagtagcaaataaacacctcaaatgcctctcctgctttcttgcatcctccgaccgatagtgacatgccaagggtttccccacctgggcatctccaagcatggcccttaaaggtccctctactggggaagctgaatcttcagaaatgctcttttttcgaggtgtctctcgaatagtcacagagcttgtctccgagtctgaaagaaatggaaaataccaataccacctgtcccaggacaaagcaagctgattacttggaagtggcagtgtaaacctaaaaaaaaaaaaaaaatttcaaactcgatgttgctactttgtttgtttctttcttcttttttctttttttttgagacaaagtcttgttctgttgcctaggctggagtgcagtggcaccatctccacctcccggattcaagcaattctcctgcctcagccccctgagttgctgggaccacaggcgcccaccaccacacctggctaatttttttgtatttttagaagagatggggtttcaccatattggtcaagctggtctcaaactcctgacctcgtgatccacccacctcggcctcccaaagtgctgggattacaggcatgagccaccgtgcttggccgatgttgctattttgaaaggcatggtgtacgtagatagattcatgttctgacatggaaggatagtctcaatacactctaaaaatgaagacaaccaagttctaaacagtttatgtacacagagttgagtagctatgctatagagtacattttttttacaaatcaataagaaaaatgatagaaaaaaatctaagaaaatagagaggcgagaatatgagtagacaattcacggaagaaaaataagaggctgataaatacatgtatagatgctgaacatcagcaatagttaaaaaaatcaaatcattaggatgctattttacccattttagattggaaaatattaaagatatccagtgttgccaagggagcatggcacagaccttctcacactatgtttgtgggaatgtgcaaggaaagagtgaacagaaggtccatctcagttttttttgtttgtttgttttttgtttttgagatagagtctcgctgtgttgcccaggctggagtgcaatggcacgatctcagctcactgcaacctccatctcctgggttcaagccattctcctgcctcagcctcccaggtagctgggagtacaggcatgcgccaccacacctggctaatttttttttttttttgtatttttagtagagctggggtttcaccatgctggccaggctggtctcgaactcctgacctcaagtcatccgcctgccttggcctcccaaagtgctgggattatagacttgagccactgcgcccagcccatctcactcagtctttgtttatctctgcagatatggcaatgacccttggccagtctctgggaactaaactcctgggatgtttacacaggtgctgggtaagatgttcttccatatgctcaagaccacgggtcaagatgtactaggctgtcagcattgttgactgtaaatatgaagatgcatgatgggcacctggtacctggattggagttctcactctgttcatgtagcaggtatgtgcatacgtgaccagctctcttcaagaactctggactataagactccaagtgggcttcctggggtggagacacctcatacatgtgtctgtggttttgcattagtggaaaaatgcacgtccatgtgacccacacagggaaagggagggctggaaacctgtgtatgacctctcttgcctttgttagttcctactgttcctgagttacaaactttgctgtaaaccgtcaatacaactcgccaagtcatgtgactccttccggaaaatcgccaaaccagtgggtggttgtgggacccccaaaacagagacatgacaactaaatgctatgtgagattcctgaaattatccttttgtcattggattaggcaatggtatcttagacatgatgtcaaaaatcacaaagcaacacaagcaaaatagatacattggacactgtcaaaattaaaacctaggccaggcacattggctcacacctgtaatcccagcactttgggaggccaaggtgggtggatcacttgagctcaggagttcatgaacagcctgggtaacatggctgaaccctgtctctaccaaacatacaagaattaggtagcgatggtacacgcctgtggtcccagctacttggaaggctgaggtgggaggatcaacaaagccccggaagttgaggctgcagtgagccatgattgcgccactgcactccagcctgggtgagaccctgtctcaaaaataataataattaaaaatttaaacctttgtgcttcaaagacactagtaagaagcaaaaagacaactaatagaatgggagaaaattttttccaatcatatgtctgataaagaacttgtttctagaatacataaagcatacttacaactcagtattttggtttttgagacggagtctcgctctgtcacccaggctggagtgcagtggcacgatcccgggtcactgcaacctccgcctcccaggttcaagtgattctcctgcctcaacctcccaagtagctgggactgcaggcacgcaccaccaggcccagctaatttttctatatttagtagagacagggtttcaccgtgttggccaggatggtctcgatctcttgacctcatgatccacccacctcagtctcccaaagtgctgggattacaggtgtgagctaccacacctggccacaactcaatatttttaaaaactcaattaaaaaagggcaaagttctcaatagtcatttctttaaagatatacaaatggccaataagtacatgaaaagatactcaacatcattagacatcaaggaaaatgaaatgaaaatcatgagattccacttcacactcactagttatataataaaaaagacagatagtaacaagcgttggtgaggatgcggagaaatcagagccctcacacactgctggtgggaatgtaacatggtacagccactttggaaaatagtctggcagtttctcaaaaggttaaacatagaattaccctatgattcaacaattccattcctaggtatctacccgaaataaatgaaaacatacattcacacaaaaacttgtgcatgaatgttcatagcagtatgattcataatagccaaaaagaagacataactcaatgttcaccaactgatgaataaaccaactgtggtacattcatacaacaaaatagtattcagccataaacaggaatgaagctctcatacatactgcaatgtgaatgactcttaaaaatattatgctaggctgggcgtggtggctcacgcctgtaatcccagcactttgggaggctgggcgggggtgggggggtggatcacgaggtctggagttcgagaccagcctggccaccatggtgaaattctgcctctactaaaaatacaaaaattagccaggtgtggtggcaggtgcccatacccagctacttgggaggctgaggcaggagaatcacttgaacccgagaggcggagcctgcagtgagccaagatcgtgccactgcactccagcttgggtgacagagcgagactccgtctcaaaaaataaataaaaaaataaaaaataaataaaaataaatgaataaaaagaaatgatgagcagaaagcaaaaccatctggaatttgtggagggaatggatttttttttggagctagtgggtttgttcatggaatgtccattaattacatatgtgccaaccacggtgctgtgagtaggtgaccttttgctaaacaagatatctggttcttgtcctcagagaggggggagaggcaggcttatattcagacattttggacatatcctacttatctctttagcatccctgtctttgaacaaccactgctccccttttcctatagtcttggtggggctgtcacatatctccccaacccccacctcagcaatgggcatcagacttccgactggccaatcataataccccgttcctcgggccataataattggttcatcatccaaagggacccagtcagagtcttccccgagatgagtatatggggttattaggcagaatataagtttgagactgtgggtagccacgttgattgctacttggaaaggtctgtagacaaaacgaagctagaaacagacagaatcaacacatgtggaaagcgaaggagggggaaggtgggggttgtggggagagagagagagagagagaacaagtaagccctgacaataccatttaaggccttagattcatgtatgccgaaagtcttgcactgcaatacttcctagttatatgggtcaaaaaaaatctaatttttcttaagctattttgattctttacatgtgggagtcctgatatatcagataataacaattattattattgcaatagagaacattcattaaatgctgactacctgccagatactgttctgagcttgttccgtgtattaagtaatttcatcatccaaacatttcattgaggtgggtactattattctccctatttaataggtaaggacggccgggcgcagtggctcacgcctgtaatcccagcactttgggaggctggggcgggtggatcatgaggtcaggagttcgagaccagcctggccaacatgatgaaaccctgtctctactaaaaatacaaaaaattagccaggcacggtggggggcacctataatcccagctactctggaggctgagacaggagaatcacttgaactcgagaggcggaggttgcagtgagtccaggttcaccactgtactctagcctgggcgacagagcaagactccatctcaaaaaaaaaaaaaaggtaaggaaatggaggcaccaatagattaagtcacttgcccacaatcacgcagtgggagaaaggggatttgaactcagagtctacactcttaagtacaacatgcacaagtgcagtaatagcaccttgagctaggagctgtgaaaacgctgagaagcggtggcctagttatcacggaaggccacttggaggaggtgacctgtaagcttcatcgtgaaacacatgaaggtgcttgccaggcagaaaaagcagggaagggtattccagacagagggaacagcatgtgtgaaggcccaaaggtggcaacacacattcaggttgaggtacggacaggtgcttcagtgaggtcagggcatggtgtacaatcaggggtggatggtgaagatgaggccagagaaagcacaggctgagtgacacagggcaccgagtgccaggctgaggggctgggacttcatcttgggggtactggggaagcaggggagggtgtgagcaggggagggagggggttagctctcagtatggaaggatcccctggggcggtgtcaactggaggggtaagtctgggggccaggaggctggggtgagggtccaggggagagaagctgaggcctggccaggggcaggagggacaaggctggggactgatgggctgtgacgggacaaggggagggtcgggtgagaattataacgatgacagccattgaagccactaccgactctgtgccaagctctgggctctgctctgtatctgttaattcatttattcctcccaatcctagacactcatgtcacctccttttcacagatgaaaaaaatcaaagcacagagaggctaagtgacttgcccaaggccacacagccaggaagcaatcagctgggatttgaacccacacaacccgactcccgagcccacgatgatcacccgtgtgttccactgcctcacccctgagtgaacctcactgaccatgagagatggggtaggaagagggctcacacctgctggatatcctcacccacctgggcaggtaactcgccgggcctctctctcctgcctcagctcttcccctcgatccacacgggagatcacgtcggatttggacccaggcagccctgcccctggggaaagatacaagagttggctgtgggtgccagaatcacagggaggtctacagggaaggtgcacgcactgagcgcctaatgattggacgtacaaatggccaacgccaagacttatttgttgtgtgcttagcacactgcagagaggctgagccaacttatttgttgagtgcttaggacactgcagagaggctgagctctgacaaagctgtttaaggctccgcgtctgtgctgttcgagttaactgcactgtgacagtataagaaacatcgtcttctgtgtttcgaagacttactaaagaaaaaaacagtaaaatctctcaatcatttgttaattgattattatttcagtgtgtcaagatgataagattttagatagcttgaggtgaataaaatgtattattaaaattaatttcatttgtttcttcttattttttttaacgtgaccgccaaaaaatgtaaaattacctaagtgggttgcatcttatttctgatggacaactctgtttagattcattgatgtccaaagcttccatctcaagacttctaaatacataagttaaaacattcactttttttttttgagacaggttcttgctctgttgcccaggccgaagtgcagtggcacaatcatggctcactgcagcctcgacctcctgggctcaagtgatcctcccacctcagcctcctgaatagctgggactacaggcatgcaccaccatacctggctaattttcaaattttttatagagatggggtctcactatgttgcccaggctgatctcaaattcctgggcttaagtgatccacccaccctgaacatttccttttttcttttttagatggagtttcactcttgttgcccaggctggagtgcaatggtgtggtctcggctcactgcaacctccgtctcctgggttgaagcaattctcctgcctcagcctcccaagtagctgggattacaggtgcctgccaccatgcttggctaattttttgtatttttagtagaaacgggtttcaccatgttggccaggctggtctcgaactcctgacctcaggtgatctgcccgccttggcctcccaaagtgctgggattgcaggcatgagccactgcacccagtccagacattttcgttttgatgaaactgtcttgaatcactgtagacaaacataccatccctgattaaaacatgaagtaattacaatagttagggtgatactaaaaagtgaatgtctattaagcgcagattacatgccaggcatgtttctaagctggttaaatgtagtacctcattttcacccttcaggcaggaaaccgaggcacagtctagtgttgtgtgagcaggaatggaagaaacacgcaacactgcaggaagtcacagagggtgcagaaatcaaaggaaacttcctggaggaggtgagccaagaggtgactagactaggggtgaggaggagatgaattttggttcaacaaacatgcctggccaggcacggtggctcatgcctgtaatcccagcactttaggaggccaaggcgggtggatcacgaggccaggagttcaagaccagcctggccaaaatggtgaaaccctgtctctactaaaaatacaaaaattacccgggcgtggtggtgggcacctgtaatcccagctactcaggaagctgaggcagagaattgcttgaacctgggaggtggaggttgcaatgagccgagatcgcgccactgcactctggcctgggtgacagagcaagactctgtctaaaaaacaaacaaacaaacaaacaaacaaaaaaacatgcccaaaggcctcccggtctccctgtgccactccctggcactgctggagatacagaaatgatctggacactcccctgtgcttgagggcgtctcaggctgaagggggaggcagacctggacacagttacaatccagggtgactccgggactcctttcctacaaggatcctgtcctccctctgtcttaggtgcccaggcctatggtcacagccttcatctctgataatgacacaaatctccacatcttggtgtcagacaccccctcccacctcccagcctcccggggactttctccactatactttatcttattattttaattttattttttgagacaggatcttgctctgttgcccaggctggagtgaagttgcacaatcacaacccactgcagacttgatctccctgggctcaagccatcttcccacctcagcctcccgagtggctgggactacaggtgcatgccaccacatcccgctaatttttacgttttttgtagagacaaggtcttgctatgttgcccaggctggtctcgaactcctgacctcaagcaatcctcccacctcagcctccccatgtgctgggattacaggcatgaaccaccgtgcctgacctttctccagttcttgactccagctatccttccatggacaaggagggtgccctagagcctggcttggtggctgggtgaaccatgaggtctgcctctaactgccacagtcaggggacagaggagcagggacccaggacagctaatcttctgatactgcagccccctcaccatgtattgcctcccatgatttcaccttccactctccagcctggcatttaccacccatccctgtaaccactcccctgcctgcacccctacctgccctgtccctcttggcctgcactgagctcaccaggtaacagccctgctgtggttagagccaaacagcctctgacctgggtgctggtgcccaagaaggcattgccactaaggtcttttttttttttttttttggagacagtctctctctgttcccatgctggagtgcagtggcacgatctcagctcactgcaacctccgcctccctagacaagatcgtgccactgcactccagcctgggcaacagagcaagactctatctccaaaaaaaaaaagaagaagaagaagaggatacacagacacggagggaagaggccacatggcacagacgcagagaaagaagggaggcgggtaccagccaagaaatgccaggaggcaccaggtgttggaagaggtgaggaaggaccctcccctggagcctttggaggcagcgtggccgagctgtcaccttggttttagactctggtccagaatcatgagagaactgatggctgttgtcataagccaccacgtttgtggttgtgcattgtggcagcagcaggatacactcccccatgcccctactgctcgtgcccgtgagcagacgcatgtgctgtcacagatgccatcttaaagacaaccttctggccaggtgccgtggctcacacctgtaagcccagcgcttttcaaggccgaagccagcggatcacttgagatcaggagttcgagaccagcctgaccaacacggtgaaaccctgtctctactaaaaattacaaaaattacccaggcgtggtggcatgcgcctgtaatcccagctactcgggaggctgaggcaggagagtcacttgaacccgggaagtggaggctgcagtgagctgagatcgcaccactgcactccagcctgggcaacagtgagactgtctcaaaaaaaaaaaaaaaaaaaaaaaggaaaaaaagacaaggccaggcgcagtggctcatgcctgtaatcccagcactttgggaggccaaggtgggcagatctctgagattaggagttcgagaccagcctgaccaacatggagaaaccctgtctctactaaaaatacaaaattagtcggatgtggtggtgcatgcctgtaatcccagctactcgggaggctgaggcaggagaatcgcttgaacccaggaggcggaggttgtggtgagccgagatcgcgccattgcattccagcctgggcaacaagagcaaaacttcatctcaaaaaaaaaaaaaaaaaaaaaagacaaccttcctgtgatcaccacagagtgaggcagtgggggaacagaaagtggtgacactggggagagtgtcagggccaggacacatacgggtatgaaagagatggtaaagacagtgccctgggctgggtgtggtggctcatacctggaatgccagcactttgggaggctgaggtgggcagatcacttgaggtcaggagttcgagacctgcctggccaacatggtgaaaccccatctctactaaaaatacaaaaattagctgggtgtggtggtgcatgcctgtaatcccagctactcagaaggctgaggcaggagaatcgcttgaacctgggaggcggaggttgcagtgagcagagctcgtgctactatactccagcctgggagacagagcgagactccgtctcaaaaacaaaaaaacaaaaaaagtcagtgccctggactggcctggcctggtctctgggtgggcaggggtctgtctctgagatgggagacctgaaggaggaatgagtttgggggtgacatgacccgctcaggggagacagggagtgtggggtcctgagccttccccatggtggtattgtggaggccacaagctatacaaggttgaaactcatgggacacattgaagggacaccattgtggatgtgtggaaaagggtgaacacagccggcctgagatgctccctttggaaagtcctgatggccaggtagaccctaggctgaggtccagcaacctggactttaggagggttcccagaatttcctaactgatgtggggctcactagagcctcagttgcttgtggttttaattttaattttaattttttttagagataggggtctcactatgttgcccaggctggactcgtaatcctgggctcaagtgatcctcctctcttggcctccgaaagtgctgggattacaggcgtgagccactgtgcccagccctaaactgtttgtgcaaacaccatggtttatgctgaacacctgcttttttcccaggagtctaaaatttgggtacattttagtagagggggctgtgtgagcaacccccaggaaaaaccctgagcacagccgggcacgatggctcacgcttgtaatcccagctcgtagggagacagaggctggaggatagcttgagcccaggagttcaagacttgcctgggcaatatagagagatcctgttaaaaaaaaaaaatgctgagccctgagtctctggtgagcttctctggtgataacatttcccatgtgttgtcacctcttgctgctgggagaattaaaccatcctatgtggctccactgggagaaggttctggaagcttggcctggtttctcctggatggcgccccgggtgcccttcccctttgccagctgtgctgtctcctttctctgtaataaaccatcactgagcgtttaactaagggctgagtccctggcacccgctaacaaatcagtcacctgtggtggtcttggggaccgaccctgatggagaagtttgggccacgtttttaatgagaccacatttttttttttttgagacagagtcactctgttgcccaggctggagtgcaatggcgagatctcagctcactgcaacctccgcctcccaagttcaagtgattctcccacctcagcctcctgagtagctgggattacaggtgcccaccaccatgcccagctaatgtttgtatttttagtagagatggggtttcactgtgttgtccaggctagtctcaaactcctgacctcaaatgatctggccgcctcggcctctcaaagtgctgggattacagatgtgagctactgcgtccagcctaagccacatttttgatgagtttgtccagagaaagtgcgtgagtgaggagggctgaggatggagacgtcacatcaccacagctacttacaggggaacataaagacggagaacgacaggtccaggaaggtgggaagtgaaaccagcaagggggctgtgctgaggtgcaggggcaagacgaggcctgggcagggctggggccgtggggatggtaaggagggtgtaggagggcagggctgtggcctgaggggtcctgtggacaaggggaagtaggggatgttgtgagcagaattgctggcatccccctaaaatgcataagttgaaacctagtccccaggtgatggtgttaggagctgaggccttttggaagcgattaggtcatgggggtagagctctcgtggcaggggttagtgcccttacaaaagacaccccagagagctctcttgctcctccactctgtaaggctatagagagcagcctctgtcggccggatgtggtggctcatgcccgtaaatcccagccctttgggaggccaaagtgggtggatcactgaggtcaggagttcaagaccagcctggccaacatggtgaaaccccctctctactaaaaataccaaaaaaattagctgggtgtggtggcgggcaccagtaatcccagctatttggggaggctgaggcaggagaatcacttgaacccgggaggtggaagttgcagtgagccaagattgcgccactgcactccagcctgggtgacagagtaagactctgactcaattaaaaaaaagaaagaaaaaaaaaaagagagaaggcgccgtctatgaaccaggaagcgccctcaccagacaccaagtctgctgtcgccttcatcttcgacttcccagcctccaaaactctgacataaatttctttctttctttctttcttttttttttttgaaacggagtctcactctgtcacccaggctggagtgcagtggcgcgatctcggctcactgcaagctccgcctcccgggttcacaccattcttctgcctcagctcccgagtagctgggactacaggcacccaccacaatgcccggctaattttttttatttttagtagagatggggtttcaccgtgttagccaggatggtctcgatctcctgacctcgtgatctgcccgccttggcctcccaaagtgctgggattacaggcatgagccaccgtgcccggccaactctgacatacatttctgctgttagaagctacccagtttacagcattttgttagagcagctcaaactaagcaagtcagggccgaggatggtgcccgggggtctggtctggagacctggggggatgtggggccaaccagaggtggggacctggaggaagagaagcaggacggtgggtgaactgagctcggcgtggggtggatgtgaggggtgggaggtggggagggctatgcctggaggcaggaaggtgggcaagtgcaggatctcggagacacactaggggacagcgtttatatgctctggggagaagatgccgaggtcagattgggacctgttgattgggaacatgtccgggaggcgcttggagcctgagattctggactgggcgttccagtgtggagcctgaagtccggggacagggaggtcaccatgtgtggaagggaaagcgttagaagaagctggatgaccaggcacggtggctgacgcctataatcccagcactttgggagtccaaggtgggcacatcacctgaggtcaggagttccagaccagcctggccaacacagtgaacccgtctctactaaaaatacaaaaattagccagcatggtggtgtgtgcctgtaattccagcaactcgggaggctgagacagaggaattgcttgaacccaggaggtggagattgcagtcagctgagatcacgccactgccctccagcctggtgacagagtgagactccatctcaaaaaaaaaaaaaaaaaaaaaaaaagaagaagaagaagaagctggggacacaggctgaagagtttgcgggactcacattttacaggacaggccaagggacttgggccctcctggctgctgggactccaggcagaaagagaggaagggagaggcccccagaaagagaggaagggagaggccaggcgtgagggaccagtgagaggagcacagaggcccccagatggcaggggatggacatgaatgagaagagggtgccaggaggcatcagagagagggctgggggcatcagagagggtgccgggggcatcaggcctcccccgggggagggcagagggaggggcctcacccagggagagaaggttccagtagttctccagcatcacgtctccagcaaactttcaccacatcaccagatttagtctggccctgctgtgggcttttttccagtgatcatgagggacccaacagctgggcacagaactcagatttgagattggaaaagacggggactctactaaggtggataggatggaggctactccctcctcctgtcattcactcatttatccattcattaattcatcccaccaaccttcccaggagtttctggtgagccactgcccatgttgggcaacgctggcggcacagagtctaggccgagtcctgacactgcccatgaatttcagcccctcatgctccctgtggccccagaagatccttctacacccagagcttcccctccccttccttgctcacagccctcccgtggctccccagtggccccaggacagagtctcagcccctctgataccatgcaggacttgccccactcatccctacagcctcatctctcctcgcatttgcagagactcctcttttttgtgcctccatttccccatctgtagaatggaattgtaataccatctgtccgtcacttcagggccaagtgagaaagcgcatcctaaataatgaaacaggattgacgtcttctcctgttgatgattagcatctgtttcaactctctgtctctcactcccgaaccttctgcactttctcctttaggaaaagactgtgaccagcttcacaaaaggcagcaaaggactatcagagaaagagaactccgagtgaggggtaagcagcctggccacagggaaggggctgggggtggagatgcctgcatctgagggaggaggggctgggggcctggactcctgggtctgagggaggaggggctgggcctgggactcctgggtctctgggtggtgatggagctacaggaggtcgtggtgcagttctctgccattgctgacccctcctttcctgctccatcgtgcaggtctggcctaggcccgggatcggaccaggctccctcaggaccccatcctttcctgcccggaccgtgaattcatctccttgaagccataacgtccgagctgctggtgcggggcagccctggccctaggcttcctacccctggaagcgagaggatgagaggaggccggcccagctccttctttcagggtggggggcattcagcctccactgtgtctgtcttttcttccctggggctccccctcgaggcgaggggccatgcatgtctgggggacccctgccccccaaaaccctctgtctgtctctgtctctttgctgtttgtccaagactcagtgtcccgacccttgttctcgccgtgaatgtcaatgggccaatcctctctgtcctttcagacacacacacacctgtgtccaccccttctgttcgccacaccctgcgtctggccggtccccccactgctgctgctatcaacgccagaataaacacactccgtgggtctcactccaactgggcctcctgtcctctctgagactgggaaaccggattggaacatgctggctctgcaagcagacaaatttgtgtttctttcaatgactgggcaacttaatgatctctctgagcctcagtttataaaaatggtgttagtcaggatcattgtgagtacagaacacaaaattcaacccaaagccataaacagaattgaaagacctctgtccatggaaagcctatgaacacattgaacacagagggacttcaggcatggttagatccagctgttcaagggactctcacttctgctttcctctttttttttttttttaatggagtttcactcttgttgcccaggctggagtgcagtggtgtgatctcagctcactgcaacctcccggtttcaagcgattctcctgcctcagcctcctgagtagctgggattacagccgctcgccaccacacctggctaactttttgtattagtagagacggggtttcaccatgttggcaggctggtctcgagctcctgacctcctgtgatctgcccgccttggcctcccaaagcgctgggtttacaggcatgagccaccgcgcctagctattggcttctctctcaggtaggtgtttgcagtggcaatgagatggtcacttggagctccaggtgtataatgctgtatctgttatgataccttcggctgaaaaaaaaaaaaaaccttcccaactgaaagagaaagatttttttgcatgtttgcatatcaaatttttcaaagacagtcccagggttggttcagctgctcaacaacattaggctctggttggcatctctgagactggtgttcgttcccctcctgagtacaaactgtctatagcagcatcatgttctcacacactggcatctaaatcaggcagtgtagaccggggcctccccttctgtgttccccttttttcctcctcagaataattctccttatttctctcttgccagaacccggctgtgtggctaccccgagttgcaaagcggtctgggtagtgaacatctgtcatttccagttcccatggtggggtgcagctttgcctagaggaagcacggggaggggaactattgttgggtaggaaattaacaggatctgctgccattgcaagaaattaacaggacttgtaattgccttcagagcagataacttcagaggaaacaatgtgagaatcagctggctcccagctgctgcgtcattcaggaacaggattctgattggtccagcgcagaccttggagacaccccgggccaatcattgggtccagtttggagcctactcttgggcccgcctcctgcctttgctgactcctcctcctcctcccctgcccatcttgcccaggattggtccaaagcccctctggacctcatccctttttgctggaaggatgaattcatctcctggaagccatatatgtaggggtcccttgactgacagttccaaatgaatcacacggcaatgggcaagggacagtccctcaaagcagtaggtgtccactacattctaccctcagctacttcacactaattcacatctacattccgggacacaacatttcaaaaactcccactgcaaaaattggtccaatcactgtgtcagtttgctaggactgatgtaacaggttacaataacctagctgaaaacaacagaaatttattctctcacagctctggaggccagaagtctgaagtcaatgtggtagtaaccaccaggcacagtggctcatgcctgtaaatcccagcactttgggaggctgaggcaggaggattgctcaagcccaggagtttgagaccaggtaatatggtgagattctcttaaaaaaaaaaaaaaaaaattggccgggcatggtgatgttcacttgtagttccagctactttggaggtcgaggtgggagtattgctcgagctcaggagttcgagaccagcctgggcagcatagcaagaccctgtctctacaactaatagtagtaataataataatagtaaaattatccaggcatgatggtgctcacctgtagtcccagctactctggtggctgaggcaggaggatcacttgagcccaggagtttgaggctgcagtgagctgtgatggcactgctgccctgcatctcaaaaacatgatgccgtgtgatacagccagatacaagggtatatgctgtaggattccacttttgtgaaattgtagaaagaaaacactaatatgggcggggcatggtggctcacgcctgtaatcctagcactttgggaggctgaggcaggcggattacttgagatcaggagttcaaaagcagcctggcacctgtaatcccagctacctgggaggctgagtaggagaatcgggaggcggaggttgcagtgggccgatcatgccactgcactccagcctgggcaacagagtgagactccaactcaaaaaagaaagagagaaagaaagaaagagagagagagagagagaaggaaggaaggagagagagacacaaagaaagaaagaaagaaagaaagaaagaaagaaagaaagaaagaaagaaagaaagaaagaaaggggccagaggccaggcacggtggctcaccctgtaatcccagcactttgggaggccgaggcaggtggatcacgaggtcaggagttcaagaccagcctggccaacatggtaaaaccccatctctactaaaaatacaaaaattaaccgggtgtggtagcgagtgcctgtaatcccagctacttggaaggctgaggcaggagaatggcttgaacctgggaggcggaggttgtagtgagctgagatcacaccactgaactccagcctgggtgacagagtaaaagaaaagaaaagaagagaagagaagaaaagagaaaagaaaaggctaatacgcaggggcagaaaatggattagtggttgactgggggcagtggcagtggttatggagagactgattactagtggacacaggaaaactttccggatgatggaagtgatcacacaaccgaatacatttgtcaaaattcattgcgtttaaaattggttcatttaaattcttgtacattgttgcaaaatacacataacacaaactttaccatcttagccaattttttttttttttgagacggagtctcgctgcaatgcccaggctggagtgcaatggcatggtcttggctcactgcaacctctgcttccccggttcaagcgattctcctgcctcagcttccagagtagctgagattacaggcatgagccactttcccaggacttagccaattttaagtgtacagttgcattgttgtgcaatcatcacccctactcatctccactctttcctcttgtagaattgaaactgttcccatcaagcaactcccactgccttcccttcccagcccctgggaagcacgttctactctctgggaaattccctatgaatttgactactctaggtacctcatgtaagtggaatcatacagcatctgtctttttgtgatgggattgtttcacttagcatgaatgtcctcaggcttcacccatgttgtagcatgtgttagcatttccttcctttttaaggttaaataattttccattatgggcctggtgcagtggctcacacctgtaatcccagcactttgggaggaagaggcaggcggatcacgaggtcaggaaatcgagaccatcctggtcaacatggtgaaaccccatctctactaaactacaaaaaattagccgggcgtggtggcaggcgcctgtagtcccagctacttgggaggctgaggcaggggaatcacttaaacctgggaggcggaggttgcagtgagccaagatcgcaccactgcactctagcctgggcgacagagcgagactccatctcaaaaaaaaaatccattatgtgtatataccacattttgtcgaaccatttatttgttgatgaacagctgggttgcctcctttaccttttgggtattgtaaataatgctgctatgaaagtgggttgcaaatatctttttgaaatattgatccattttcttgtacacaaattatattttgataaagttggctaaaactaatactcccacctaacataactatctctagtgcaactgcagaagctttcaccccttctgcaaagggagggatcccaaagccacatccaatcctcagaccaagatttctggatattggctattcctttcatcaagggcacatggagtctctcttgatcctgaaaattaatgttaaggctgggcacggtagctcacacctgtaatcccagcactttgggaggccaaggcaagtggatcacctgaggtcaggagttcaagaccagcctggccagcatggtgaaaccctgtctctactaaaagtacaaaaattagcccggcatggtggcacacacctataatcccagctactcgggaggccgaggcagaagaatcacttgaacctgggaggcggaggttgcagtcagtggagattgtgccactgcactccagcctggtgacagagcaagactccatctaaaaaaaaaattaatgttaaatgaaattgtagccccctcagcaacccacccctgtgtataacagtggaggaaaaacaagaaaacaatcacaattctcacttgaaaggggagggaagagaaacaaaatagtatatgccatttgctagacttgccaagactcctgcactttcaagagacaaaaaaccggccttttaaaaaattattgccaagctcggtggctcatgcctgtaattccagcactttgagaggctaagattggaggatcactagagcccaggagttcgagacccagccttggcaacatagcaagactccatctctttaaaaaaaaaaaaaaaaaaatatatatatatatatatatatatatagccaagtgccatggtgtgcacctgtagtcccagctactcaagaggctaaggtgggaggatcgcttgagcccaggaggtcaaggctgcagtgagccatggttgagccactgcagtccagtctggacgacagagacccagtttcaaaaaaaaaattattgaagtacaacatactcacaaagaaactcacaaatacccagtaagtatggatcagatgacagactgagcacaccatgtaaccatgggtaaccagccctgggtcaggaactagaacattaccagctctccaaacccctcatgctccttgtcagtcacttttttgtgttttttttttttttttgagacagagtctcgcctggagtgcagtggcgctatctcggctcactgcaagctccgcctcctgggttcacgccattctcctgcctcggcctcccgagtagccgggactacaggcgcctgccactatgcctggctaatttttttgtatttttagtagagacggggtttcaccgtgttagccaggatggtctcgatctcctgacctcatgatctgcccacctcggcctcccaaagtgctgggattacaggcgtgagccaccgcgcccggccccttgtcagtcacttcttcacctcaaaggtaactactaccctgatttctgacaccataagtcagtttgccttgtttttgatcttaatctgcttggaatcctacaagcatagagacttgtgtgttggaattcttttttttttttttttttttttttgagacggagagtcgctctgtcaccaggctggagtgcagtggcatgatctcagctcactgcaaccttcgcctcccaggttcaaacgattctcctgcctcagcctcctgagtagctgggattacaggtgcgcactaccacacccagctaattttttgtatttttagtagagacagggtttcaccatgttggccaggatggtttctatttcttgacctcgtgatctgcccatctcggcctcccaaagtgttggaattacaggcgtgagccattgcacctggcctgaattgttttattcatcatacgtctatgagatttgtccatgtagttgctgattgttggaggttgttcattatcattgctgtataagagtgtgttatgagccaggcacggtggctcatgcctataatcctagcactttaggagggtgaggcaagcagatatcttgagcacaggagttcaagaccagcctgagcaacatagcaagaccccgtctctacaaaaaaaatacaaaaattagtggggtgtggtggtgcgtgcctatcatctcagctacttgggaagctgaggtgggaggatggcttgagcttgggaggcagaaattgcagtgagctgagatcacaccactgcactacagcctgggtgacagaggacaatcttgtctcaaaaaaaaaagtgtgttatgggaatacataataatctatgtatccattctactgttgattgacatttaggtgccttctgatttggcatgatcacttacagtactgctatatacattgaattttggtgaacatatgtaggcatttctgtatttctgttgggtatatacctagaagtgtaattgctgggtcccagggtgtatgcatggtgtgggcatgttcctctttttttttttttttttgagatgggagtggccaggctggtcgtgacctcaagtgatccgccgcctcccaaagtgttggaattacaggcatgagtcaccattcccagcttcatgttcatccttaatagacactgccaaccaggttttcaaactaattttctccatttatacacccgccagcagtctctgagaatttcagctgctcgccaacatttggtattgttagtcctttcaattttagcaattctggtggggctgtagccgtgttttattatggttttaatttacctttagcccaatgcctaaagaaatttaacaccgttttgggccaggcgcagtggctcatgcctataatcccagcactttgggaggccgaggcgggtggatcacgaggtcaggagatcgagaccacggtgaaaccccgtctctactaaaaatacaaaaaattagctgggcgcagtggcgggtgcctgtagtcccagctactcaggaggctgaggcaggagaatggcgtgaacccagaaggcggagcttgcagtgagccaagatcacgccactgcactccagcctgggagacagagcgagactccgtctcaaaaaaaaaataagaaagaaatttaacactgtttcaaatatttattgggcatatgaacatgctactttgtgaaatgtcaattcacgccattcgtccatttttcgactggtttttctgccttttttaaaaaacaggttagtaggagttatttctttatttttcttatgagtcttttgttagaatacatattcttctcccactctctggcttgtcttttcattctcttaatggtattttttgatgaggatcagtttctattttaatatagtccaatttatcaacattttcctttatagttaaggctcctttgtttctggtttaagaaatattttctggccaggcacactggctcatgcctgtaatctcagcactttgggaggctgaggagggaggatcatatgagcctaggagttcgagaccagcctgggcaacatagcgagaccctatctctattaacacaaacaagtaaataaaagaaatattttcttaccctgaaggttctgaagatactctatgatattttcttctagaagttttattgtttaagctttaacatttagatctacaacacatctggaatcaatttttgtgtatggtgtgaggtagaggtcatatggttatcaactggctcagccctatttatccaaaaagatcatcttttgcttctcactgcactgaaatgttgcttttgtcataaaccaagttaccgtatatgtgtgaacttttcctgatttttccgtcttgttcttttggtctatttgtttttccttgcaagagtatgctgctttaattattattataataagccttgctctctggaaagtactctggctttttttgtttttgacaaagggaatttgttgacttatagaaccgagctatataactagcttcaggcataactggatccaggcactaaaatgaatctttagcaataccgctcatttcccatctgggctttacttttctgtatcttgacttccctctcaggcagaatctcttccctcacggtgacaaacagggcccacagcagctcgaagcttccatactatcattttaacaacctagcttatcattttaacaacctagcagaaaaggggtactgccttcctgaatggtgataccaaagtctcaaggttagctctcattggcccaacttgggtcacatgtccatttctatagtaaccatgtgtcttagtccatgttgtcttgctataaaggaaaacctgacgctgggtaatttttattttattttattattttttttttgagacaggatcttgctctgtcacctaggctggagtgcagtggcgcaatcttggctcactacaatgtccgcctcccaggtacaagtgattctcctgcctccagtgtagctggtatgacaggtgcccgccaccacacctggctaattttttgtatttttagtagagacagggtttcaccatgttagccaggctggtctcgaactcctgacctaaagtgatccacgaggctgggtaatttataaagagaaaaaggtgtatttggcttatgattctgctggctggaagattgggcatacagagaaagtctagagctacttccactcttggtggaaggagaaagaaagcagggatcatgtgacaatagaggaagcaagagaggcaagtgtcagcctctctttaacaaccaactctaatgggaactaatggaggaagaactcactcacccacactcccagggagggcattaatctatttgtgaggggtccacccctgtgacccaaacacctctcattaggaccccatctccaacattggggatccaatttcaagaacgaaatttagaaggcagcctggccaacacggggaaaccccgtctctcctaaaaatacaaaaattagccgggcgtggcatgtgcctataatcccagctactcaggaggcggaggcagaagggtcacttgaacccaggaggtggaggttgcactgagccaagattgtgcaactgcactccagcctgggtgacaaagcaaaactctgtctcaaaaaaaaaaaaaaaaaattggatgggacatacatccaaactactgcacatcataaccaaggtcatgaagtactcaggttggccaggtctgactcttgttctcactctgagatccctggcaagatccagtcaaaaaatgtatattttgcatggagaggagtgataggaaaatcagatgtttaagagaataaaaagagaagctatagattgtgagaaaatcttttcaaaacacctatcagacaaaaagctggtatccaggccaggtgtggtggctcacatctgtaatcccagcattttgagaggctgaggtgggcggatcacctgaggtcaggagtttgagagcagcctggccaacgtggcaaaaccctgtctctactaaaaatacaaaaattagcctggcatggtggtgggtgcctgtaatcccagctactcgggaggctgaagcaagagaatcacttgaacctgggaggcggaggtggcagtgagctaagattgcgccattgcactccagcctgggcaacagagcaagaccttgtctgaaaaaaaagaaaagaaagaaagaaaaagaaaaagagaaaagaaagctggtatacaaagaactaaaacttaacaataagaaaacaaacaacccgctccctctccatctccctctccctctccctctccctctcccatctccccacggtctccctctccctctctttccacagtctccctctccctctctttccacggtctccctctgatgccgagccgaagctggactgtactgctgccatctcggctcacgcaacctccctgcctgattctcctgcctcagcctgccaagtgcctgccattgcaggcacacgccgccacgcctgactggttttcgtatttttttggtggagacgggatttcgctgtgttggccaggccggtctccagctcctaaccgcgagtgatccgccagcctcggcctcccgaggtgccgggattgcagacggagtctggttcactcagtgctcaatggcgcccaggctggagtgcagtggcgtgatctcggctcgctacaacctccatctcccagccgcctgccttggcttcccaaagtgccaagattgcagcctctgcccggccaccaccccgtcggggaagtgaggagcatctctgcctggccgcccatcgtctgggacgtgaggagcccctctgcctggctgcccagtctggaaagtgaggagcgcctcttcccggctgccatcccatctaggaagtgaggagcacctcttcccggccgccatcccatctaggaagtgaggagcgtctctgcctggccgcccaccgtctgagatgtggggagcgcctctgccccgccgccccgtctggtatgtgaggagcgcctctacccggccgcgaccccgtctgggaggtgaggagcgtctctgcccggccgccccgtctgagaagtgaggagaccctccgcctggcaaccgccccgtctgagaagtgaggagcccctccgcccggtagccaccccgtctgggaagtgaggagagtctccgcccggcagccaccccatccgggagggaggtgggggtcagcccccgccaggccagcagccccgtccgggagggaggtgggggggtcagcccccctcccggccagccgccccgtctgggaggtgaggggcacctctgcccgaccgcccttactgggaagtgaggagcccctctgcccggccgcccctactgggaagtgaggagcccctctgcccggccaccaccccgtctgggagttgtacccaacagctcattgagaacaggccatgatgacaatggcggttttgtggaatagaaaggggggaaaagtggggaaaagattgagaaatcggatggttgccgtgtctgtgtagaaagaagtagacatgggagacttttcattttgttctgtactaagaaaaattcttctgccttgggatcctgttgatctgtgaccttacccccaaccctgtgctccctgaaacatgtgctgtgtccactcagggttaaatggattaagggcagtgcaagatgtgctttgttaaacagatgcttgaaggcagcatgctcgttaagagtcatcaccactccctaatctcaagtacccagggacacaaacactgcggaaggccgcagggtcctctgcctaagaaaaccagagacctttgtgcacttgtttatctgctgaccttccctccactattgtcctatgaccctgccaaatccccctctgcgagaaacacccaagaatgatcaattaaaaaaaaaaagaaaaaagaaaacaaacaacccaatttaaaaataggcaacagatctgaacagacacttcaacaaagaagatatgcagatggcaaataagtaaataaaaaggtgtggtggggtggctcctgcctgtaatcccaacactttgggaggctggggcaggaggatcatttgaggccaagagtttcagaccaacctaggcaacacattgagacgccatctctataaaaaataaaaagaaaaaggtcagatgttgtggctcacacctgcaatcccagcactttgggaggccacagctggtaattcccttgagctcaggaggtcaagaccagcccaggcaacgtggtgaaaccccatctctacgaaaaatacaaaaaattagccagatgtggtggtgcacacctgtggtctcagctacttggaagggtgaggtcggaggatcacttgagtctaggaggcagaggttgcagtcagcagagatcgtgccactgcattccagcctggatgacagagcgagaccctgtttctaaataaataaataaataaaataataaaaatagaaataaaaaaatagccaggtgtgacagcacacaactgtagtcccagctactggggaggccgagaaggaggatctaagagttggaggcggcagtgagctatgattgcactgctgtactccagcctgggcaacagagaccctgtttcttaaaataaataaataaacaaacaaacaaataaataaaaggtacttgggccgggcgtggtggctcacacctgtaatcccagcactttgggaggccaaggtgggcagatcacctgaggtcaggcattcgagaccagcctgatcaacatggagaaaccccatgtctactaaaaatacaaaattagccaggcgtggtggtgcatgcctgtaatcccagctacttgggaggctgagacaggagaatcacttgaacctgggaggcagatgttgcagtgagccgagatcatgccattgcacttcagcctcggcgacagagcaagactctgtctccaaaaaaaaagggggctcaacatcaaatgtcattaggaaattgcaaattaaagcaatgatgacatacgacaaccacctattagaatggtgaaaatccaaaacatgaataacaccaagtgctgatgaggatgaggaacgtcaggaactcttattcatctctggcagtaatgcaaaatggtgcagccactttagaagacaatttggcacttccttacaaaactaaacactcttaccatatattgcagcactcatgttccttggtatttactcaaatgagctcaaaacttatatccccacaaaaacctgaagacaaatattcatagcggctctgtacataattgccaaaacttggaagcaaccaagatgtccttcagtagatgaacaaactgcagtacatgcatacaatggaatattactcagttataataagccatgaaaagatatggaggaacctaaaatgcatattgttaagtgaaagaagccaatacgaaatcgctacatatggtatgattccaactataccacattctggaaaaggaaacactatagagacagttaaaaaaaatcattggtttttaggggtttgggaggagggaaggatgaatcagcagagcccagaggagttttaggacagtgaaactactctgcataatactataatggtggacacatgtcattataaatttgttcaaacccatagacaataaaacactaagagagaaactgaatgtaaactatggactttcctctcaattttgctgtgattttaaaactgaaaaaaaaaaaaaaaaaaaaaaaaaaaggcctggcgcggtggctcatgcctgtaattccagcactttgggaggccaaggtgggcagatcatgaggtcaggagatcgagaccatcttggataacacggtgaaaccccgtctctactaaaaatacaaacaattagccgggcgtgattgcgggcacctgtagtcccagctactcaggaggctgaggcaggagaatggtgtgaacccaggaggtggagcttgcggtgagctgagatcacgccactgcactccagcctgggtgacacaggaagactccatctcaaaaaaaaaaaaaaaaaaacaacaccaaaaaaatgctttattaaaaaaaaaaatagaatgtacaaggtatcacacaaggagtggaccttaatgtaaactgcagatttcagctaataataatgtatcaatattggcttattaattgtaacaaacgtagcacagtaacacaagatgttaacagggaagatgaggggcaatgaagggatgaaaggggatgtagaaactctcggtacttttcattcgattttttcctgtaaacctaagactgctccaaaaaaaattattaatgaagaagaaaatcagagataacagatgtcactcaggcaaaaatatcaggtgtccattataaggatccaagttgcccctaggtattcactctaataacagtttgcaacttggggtatgcagtatagaagggataaagaggctggcgcagtggttcacgcctgtaagcccagcagtctggaaagcggaggcgggcggatcacctgaggtcaggagttgaagaccagcctggccaaaatggggaaacctcgtctctattaaaaatacacaaaattgccagacatggtggcacgcgcctgtaatcccagctactgggtcgctgaggcaaaggaattgcttgaacctgggaggcgggggttgcagtgagccaaaattgcgccactgcactccagcctgggcaacagagtaagactccacctcaaaataaaaataaataaataaataaataattaaatttaaaaaaaggccaggtagcggtggctcacacctgtaatcccaccactttgggaggctgaggcgggcagatcacaaggtcaggagatagagaccatcctaacacagtgaaaccctttctctactaaaaatacaaagaattagctaggcgtggtggcacgtgcctgtagtcccagctactcgggaggctgaggcagatgaatcacttgaacccggaaggcagaggttgcagtcagccaagatcgcaccactgcccttgagcctcagcgacggagcaagactccatctcaaaaagaagccaaaaatacaaaaattagccaagtgtggtagtgtgcgcctgtaacctcagggtgagagaggagactctcttcaacccagaaggcagaggtcgagatcataagactgcactccaccctaggcaacagagcaagactccatctcaaaagatatattgcagtaatttaaaaacaattctattggaaacgcaatttcttcctgtcgagacctccctttatgacggaacaatgaaaaaacaatttttttcaattttgtccaggttagcttcaaacacatagcatcgccagcttgtgcgccaggacaacctgacggagccaccgaagctggtggaaaagtgctctcaatttttccatttgaccttctggggagcgatgtagccaatcacgagaggctcacccctgacatcacccagtccccagggacagagagggccctgcgttccatggcgccccctggagggaggaaggggaactgtatctgagagttcagtatctgacaataaggaaaaggcatagtagatcagatggtgcctactgttctggagagaagaaacaacggggttggggaatgcggagttgcagtttataatacaggcctcatgtataaggcagacctcatggggaaggtaacatctgtgcagagaaatggagatgagggctaggagccatgcaaatactggaacatgcttgccagcagaagtcgagaaacatggccggcgcagtggcccacacctgtaatcccaggactttgggaggccgaggcaggtagatcacgaggtcagcagttcgagaccagcctggccaacatggtgaaaccctgtctctactaaatatacaaaaattacccgggcatggggacgggtgcctgtaatcccagctgttcaggaggctgaggcaggggaatcgcttgaacccgggaggcggaggttgcagtgaacagagatcgtgtcactgcactccagcctgggtgatagagtgcgactccgtctgaaaaagaaaaaaaaaaaaaaagaattcaagggcaggccggtggttttagacggcaacctttaccgaagcctcagtgcacagccacagcagagggacacacacctgtatcttttctaagactgggagaattttacaattgcttgactaattgaacagtgcctcgaggatgttacactaggttataaataaattcctgccgtgtttagctgaggcacgaacacaatgcccactgacaattccactttcctcgagggccattctttatgaaaggctgtaggagttccacgacattgttgattcctggattctccaagtctctagaacttgagaactacttttgtgtatttttttaacctttaagttcagagtttctaatgtccgttttatactactataaaatggtactatgtattctttattgatggtactatttacactttattttatacagactctggctccacaaaaaggttaaaaattagccaggtgcagtggtgcacatctgcggccgcagctactcaggaggctgaggcagaaggattgcttgagctcggatggtcagggctgcaatgagctatgatcacacatcacatcaatgcactccagcctgggcaacggagtgagaccctgtctctaaaagaatagaagaggctgggcgcggtggctcacgcctgtcatcctaccactttgggagaccaaggcgagtggatcatttgaggccaggtgttcaagaccagcctggtcaacatggcgaaaccccatctcttggcaggcgactgtaatcccagctactcaggaggctgagataggagactcccttgaaccgacgaggcggaggttgcagtgagcgaagatcacaccactgcactccagcctgggcaacagagcaaggctcggtctcccaaaaaaaaaaaaaaaaaaagacacatggaagtaatttaaaaacacttaggaagatgtcatttcttcctatcaaggcgtcctccctttatgttttgtcgttatattgggaacgataaaaaaaatccttttttccgacccatgtggaccaggctggcctcgaactcgtgccctggaacccccgcctccgtgagggcccgagggcaggcgcaaccggcctgagccacaatggctccgggtgtcggggctgtcctttagtccctttgatcttacgcagggtgagggagccaatcaccagaggctcccccctgtcgtcacccagtccccagggccagtgagggccctgcgttccatggcgccccctggagggaggaaggggaactgtatctgagagttcagtatctgacaataaggaaaaggcatagtagatcagatggtgcctagtgttctggggagaagaaacaacggggttggggaatgcggagttgcagtttataatacaggcctcatgtataaggcagacctcatggggaaggtaacatctgtgcagagaaatggagatgagggctaggagccatgcaaatactggaacatgcttgccagcagaagtcgagaaacatggccggcgcagtggcccacacctgtaatcccaggactttgggaggccgaggcaggtagatcacgaggtcagcagttcgagaccagcccggccaacatggtgaaaccctgtctctactaaaaatacaaaaattagctgggtgtggtggcacacgcctgtaatcccagccacttgggagggtgaggtaggagaatcgcttgaacctgggaggtagaggttgcagtgatgcagtgagccgagaccacgccattgtactctcgcctgggcgacagagcgagactccatctcaaaaaaaaaaaaaaaaaaagcaaaaacaaacaggtgagattcattttgataaaatagctgatttaacctaatatacctaaaacatcataattttaacataatcaatagaaacatttttgcaagattttatgttattttttaccatacgacgtcttggaaatcttggtttggaccagccatgttcaactgctcagtagccatgtgtggccagaggcggccgtattggacagtgcagatggtgcatgagggtgttcgggcagtgggaacagccagtacagaggccctgtgggggcacatgcctgctgctacgggaacagtgaggagccccgtgtggctgcagtggagtgagagggagaaggtgggagatgtaaccaacagtctcatcattcattcattaaatccttttttttctttttttgagactgagtttcgctcttgttgcccaggctggagtgcaatggtgccatctcggctcaccacaacctccacctcttgagttcaagcgattctcctgcctcagccttccgagtagctgggattacaggcatgcgccaccatgcccggctaattttgtatttttagtagagctggggtttctccctgttggtcaggctggtctcgaactcccgacctcaggtgatctgcccgccttgacctcccaaagtgctgtgattacaggcttgagccactgctcccagtccattgaatgtgtgtatatatagttgaataaagaagacaccggagtttgttctgtatcttctcctttcaaattctgtgccatttgaattttttcctattccttttatatatttttaattgacaaattgtacatatttatcatgtacatattgttttgaaatatgtatataccgtagaatggctaaatcaagatcattaacatatgtattactttacctattttccttttttcgttgtgtctctgccaggtttcggtatcagaatgactctgacctcatagaatgagttagagagcagttgctcctcctcaattgtgtggaataatttcagtaggattggtgccggcttttctttacacatctggtaggattcgactgtgaatccgtctagtctaaggttttttgtgctggttggtaggttttgtatgactaactcaattttggaactcatcgttggtttgttcagggtttccatttcttcctggttcaatcttgagaggttttatgtttccaggaatttctctatttcttctagttttctagtttgtgtgcatagacgcatgtggaatagtctcagggtttcttgtatatctctgggtcagtggaaatgtcacctttgtcatttctgattgtgtttatttggatcttgtctttttttctttattaatctagctagtggtcttcccatgttatttatgctttcaaaaatatcaactttgtatgaattaacagcatttgccgtgacctggatgagaccggagactgttattctaagtgaagtaagtcaggaatggaaaaccaaacatcgtatgttctcactgatatgtgggagctaagctatgaggacgcaaaggcgtaagaatgatacaatggactttggggacttagggggacgagttggcgggggcgagggataaaatacaacaagtagggtgtagtgtatactgctcaggtgatgggtgcaccaaaatcacaaatcaccactaaagagcttatgtaaccacacaccacctgtaccccaataatttatggaataaataataaataaataatttttttaaaaaatcaactttgggtttcattgatcttttgtatggttttttacgtctccatttcattcaggtcagctccgatgttggtttttttttttcttctgctagctttggggttgatttgctcttgtttttctaattcctctaggtgtgatgttaggcggttcatttgagatctttctagcttcttagtgtagccctttagcactagaaacttcctttgagcactgttctagctgtgtcccagagattctgggatgttgtatgtttgttttcattagtttcagataatttttttatttctgccttaatttcagtctttacccaaaagtcatttggaagcaggttgtttaatttccatgccgactctaggccaggcatggtggctcatgcctgtaatcccagccacttgggaggctgaggcaggagaatcgcttgaatccaggaggcagaggtttcagtgagccaagatcacgccactgcactccagcccgggcgacagagtgaggctgcgtctcaaaaaaaaaaaaaaaaaaaaaattgccccttcttaagtttgcatttagatctcttctcctttgaccacttttaatttatcttcacttctgatatgacatttaatttttcattcattttctgtctattattgttccttttttaacttaaaaaaaattctgtactttatgaatttctgtttcaaggtgtttttcccatctccaaatgcttatttgaaaatgtttcctttcctcttggttcatttcttctggtgtgtgtgtgcgcgcgcccgcgtgcatgtgtgtactcgggtctcattttctgctttcttcctgcagtacttcgtttatgggagatgcacttcgcttttcttatttttttagtagagagggggtttcactggtttagccagaacagtctcgatctcctgacctcgtgatccgcccacctcgggctcccaaagtgctgggattccaggagtgagccaccgcgcccggccgtccactttgcttcttgcagaggctgatggtttgagtaatttccgagattcatagctcgagcgcgccctgttctgtctatgcagtgaagggcagctttttgcatccacggctttttgttggcaaggaggaatgtgcagtggccagatttgtttcttccccttttgttgctgttgttgttgttgctgctgctgttattgttgttgttgttgtattttattttgtagcatcctaaagtgtcccctccttctatttcttatccttatccaggtagggtttagaaaagctaacttcaggggcaggggagagagagaaagagaggaagagaaaatgagaatgaatgacaatacatgaacccatgggtcaacctttatttcaaggcagcccaaaaggacggctctcccttctctttcactctcttctctaggtgtgaagctgatgcagcacaggcgagccccaaaattgaggcttagcccgggggggttcttggcttctcctagaaactaattcaagaagccgggcgcagtggctcacgcctgtaatcccagcactttgggaggctgaggcggatggatcacttgaggtaaggagttcgagaccagcctggccaacatggtgaaaccccatctctactaaatatacaaaaattacccgggcatggggacgggtgcctgtaatcccagctgttcaggaggctgaggcaggggaatcgcttgaacccgggaggcggaggttgcagtgaacagagatcgtgtcactgcactccagcctgggtgatagagtgcgactccgtctgaaaaagaaaaaaataattcaagggcaggccggtggttttagacggcaacctttaccgaagcctcagtgcacagccacagcagagggacacacacctgtatcttttctaagactgggagaattttacaattgcttgactaattgaacagtgcctcgaggatgttacactaggttataaataaattcctgccgtgtttagctgaggcacgaacacaatgcccactgacaattccactttcctcgagggccattctttatgaaaggctgtaggagttccacgacattgttgattcctggattctccaagtctctagaacttgagaactacttttgtgtatttttttaacctttaagttcagagtttctaatgtccgttttatactactataaaatggtactatgtattctttattgatggtactatttacactttattttatacagactctggctccacaaaaaggttaaaaattagccaggtgcagtggtgcacatctgcggccccagctactcaggaggctgaggcagaaggattgcttgagctcggatggtcagggctgcaatgagctatgatcacacatcacatcaatgcactccagcctgggcaacagagtgagaccctgtctctaaaagaatagaagaggctgggcgcggtggctcacgcctgtcatcctaccactttgggagaccaaggcgagtggatcatttgaggccaggtgttcaagaccagcctggtcaacatggcgaaaccccatctcttggcaggcgactgtaatcccagctactcaggaggctgagataggagactcccttgaaccgacgaggcggaggttgcagtgagcgaagatcacaccactgcactccagcctgggcaacagagcaaggctcggtctcccaaaaaaaaaaaaaaaaaaagacacatggaagtaatttaaaaacacttaggaagatgtcatttcttcctatcaaggcgtcctccctttatgttttgtcgttatattgggaacgataaaaaaaatccttttttccgacccatgtggaccaggctggcctcgaactcgtgccctggaacccccgcctccgtgagggcccgagggcaggcgcaaccggcctgagccacaatggctccgggtgtcggggctgtcctttagtccctttgatcttacgcagggtgagggagccaatcaccagaggctcccccctgtcgtcacccagtccccagggccagtgagggccctgcgttccatggcgccccctggagggaggaaggggaactgtatctgagagttcagtatctgacaataaggaaaaggcatggtagatcagatggtgcctagtgttctggggagaagaaacaacggggttggggaatgcggagttgcagtttataatacaggcctcatgtataaggcagacctcatggggaaggtaacatctgtgcagagaaatggagatgagggctaggagccatgcaaatactggaacatgcttgccagcagaagtcgagaaacaaggctggcgcagtggcccacacctgtaatcccaggactttgggaggccgaggcaggtagatcacgaggtcagcagttcgagaccagcctggccaacatggtgaaaccctgtctctactaaaaatacaaaaattagctgggtgtggtggcacacgcctgtaatcccagccacttgggaggctgaggcaggagaatcgcttgaatccaggaggcagaggtttcagtgagccaagatcacgccactgcactccagcccgggcgacacagtgaggctgcgtctcaaaaaaaaaaaaaaaaaaaaaaaaattgccccttcttaagtttgcatttagatctcttctcctttgaccacttttaatttatcttcacttctgatatgacatttaatttttcattcattttctgtctattattgttcgttttttaacttaaaaaaaaattctgtactttatgaatttctgtttcaaggtgtttttcccatctccaaatgcttatttggaaatgtttcctttcctcttggttcatttcttctggtgtgtgtgtgcgcgcgcccgcgtgcatgtgtgtactcgggtctcattttctgctttcttcctgcagtacctcgtttatgggagatgcacttcgcttttcttatttttttagtagagagggggtttcactggtttagccagaacagtctcgatctcctgaccttgtgatccgcccacctcgggctcccaaagtgctgggattccaggagtgagccaccgtgcccggccgtccactttgcttcttgcagaggctgatggtttgagtaatttccgagattcatagctcgagcgcgccctgttctgtctatgcagtgaagggcagctttttgcatccacggctttttgttggcaaggaggaatgtgcagtggccagatttgtttcttccccttttgttgctgttgttgttgttgctgctgctgttattgttgttgttgttgtattttattttgtagcatcctaaagtgtcccctccttctatttcttatccttatccaggtagggtttagaaaagctaacttcaggggcaggggagagagagaaagagaggaggagaaaatgagaatgaatgacaatacatgaacccatgggtcaacctttatttcaaggcagcccaaaaggacggctctcccttctctttcactctcttctctaggtgtgaagctgatgcagcacaggcgagccccaaaattgaggcttagcccgggggggttcttggcttctcctagaaactaattcaagaagccgggcgcagtggctcacgcctgtaatcccagcactttgggaggctgaggcggatggatcacttgaggtaaggagttcgagaccagcctggccaacatggtgaaaccccatctctactaaatatacaaaaattacccgggcatggggacgggtgcctgtaatcccagctgttcaggaggctgaggcaggggaatcgcttgaacccgggaggcggaggttgcagtgaacagagatcgtgtcactgcactccagcctgggtgatagagtgcgactccgtctgaaaaagaaaaaaagaattcaagggcaggccggtggttttagacggcaacctttaccgaagcctcagtgcacagccacagcagagggacacacacctgtatcttttctaagactgggagaattttacaattgcttgactaattgaacagtgcctcgaggatgttacactaggttataaataaattcctgccgtgtttagctgaggcacgaacacaatgcccactgacaattccactttcctcgagggccattctttatgaaaggctgtaggagttccacgacattgttgattcctggattctccaagtctctagaacttgagaactacttttgtgtatttttttaacctttaagttcagagtttctaatgtccgttttatactactataaaatggtactatgtattctttattgatggtactatttacactttattttatacagactctggctccacaaaaaggttaaaaattagccaggtgcagtggtgcacatctgcggccccagctactcaggaggctgaggcagaaggattgcttgagctcggatggtcagggctgcaatgagctatgatcacacatcacatcaatgcactccagcctgggcaacggagtgagaccctgtctctaaaagaatagaagaggctgggcgcggtggctcacgcctgtcatcctaccactttgggagaccaaggcgagtggatcatttgaggccaggtgttcaagaccagcctggtcaacatggcgaaaccccatctcttggcaggcgactgtaatcccagctactcaggaggctgagataggagactcccttgaaccgacgaggcggaggttgcagtgagcgaagatcacaccactgcactccagcctgggcaacagagcaaggctcggtctcccaaaaaaaaaaaaaaaaaaagacacatggaagtaatttaaaaacacttaggaagatgtcatttcttcctatcaaggcgtcctccctttatgttttgtcgttatattgggaacgataaaaaaaatccttttttccgacccatgtggaccaggctggcctcgaactcgtgccctggaacccccgcctccgtgagggcccgagggcaggcgcaaccggcctgagccacaatggctccgggtgtcggggctgtcctttagtccctttgatcttacgcagggtgagggagccaatcaccagaggctcccccctgtcgtcacccagtccccagggccagtgagggccctgcgttccatggcgccccctggagggaggaaggggaactgtatctgagagttcagtatctgacaataaggaaaaggcatggtagatcagatggtgcctagtgttctggggagaagaaacaacggggttggggaatgcggagttgcagtttataatacaggcctcatgtataaggcagacctcatggggaaggtaacatctgtgcagagaaatggagatgagggctaggagccatgcaaatactggaacatgcttgccagcagaagtcgagaaacaaggctggcgcagtggcccacacctgtaatcccaggactttgggaggccgaggcaggtagatcacgaggtcagcagttcgagaccagcctggccaacatggtgaaaccctgtctctactaaaaatacaaaaattagctgggtgtggtggcacacgcctgtaatcccagccacttgggaggctgaggcaggagaatcgcttgaatccaggaggcagaggtttcagtgagccaagatcacgccactgcactccagcccgggcgacacagtgaggctgcgtctcaaaaaaaaaaaaaaaaaaaaaaaaattgccccttcttaagtttgcatttagatctcttctcctttgaccacttttaatttatcttcacttctgatatgacatttaatttttcattcattttctgtctattattgttcgttttttaacttaaaaaaaaattctgtactttatgaatttctgtttcaaggtgtttttcccatctccaaatgcttatttggaaatgtttcctttcctcttggttcatttcttctggtgtgtgtgtgcgcgcgcccgcgtgcatgtgtgtactcgggtctcattttctgctttcttcctgcagtacctcgtttatgggagatgcacttcgcttttcttatttttttagtagagagggggtttcactggtttagccagaacagtctcgatctcctgacctcgtgatccgcccacctcgggctcccaaagtgctgggattccaggagtgagccaccgcgcccggccgtccactttgcttcttgcagaggctgatggtttgagtaatttccgagattcatagctcgagcgcgccctgttctgtctatgcagtgaagggcagctttttgcatccacggctttttgttggcaaggaggaatgtgcagtggccagatttgtttcttccccttttgttgctgttgttgttgttgctgctgctgttattgttgttgttgttgtattttattttgtagcatcctaaagtgtcccctccttctatttcttatccttatccaggtagggtttagaaaagctaacttcaggggcaggggagagagagaaagagaggaagagaaaatgagaatgaatgacaatacatgaacccatgggtcaacctttatttcaaggcagcccaaaaggacggctctcccttctctttcactctcttctctaggtgtgaagctgatgcagcacaggcgagccccaaaattgaggcttagcccgggggggttcttggcttctcctagaaactaattcaagaagccgggcgcagtggctcacgcctgtaatcccagcactttgggaggctgaggcggatggatcacttgaggtaaggagttcgagaccagcctggccaacatggtgaaaccccatctctactaaatatacaaaaattacccgggcatggggacgggtgcctgtaatcccagctgttcaggaggctgaggcaggggaatcgcttgaacccgggaggcggaggttgcagtgaacagagatcgtgtcactgcactccagcctgggtgatagagtgcgactccgtctgaaaaaaaaaaaaagaattcaagggcaggccggtggttttagacggcaacctttaccgaagcctcagtgcacagccacagcagagggacacacacctgtatcttttctaagactgggagaattttacaattgcttgactaattgaacagtgcctcgaggatgttacactaggttataaataaattcctgccgtgtttagctgaggcacgaacacaatgcccactgacaattccactttcctcgagggccattctttatgaaaggctgtaggagttccacgacattgttgattcctggattctccaagtctctagaacttgagaactacttttgtgtatttttttaacctttaagttcagagtttctaatgtccgttttatactactataaaatggtactatgtattctttattgatggtactatttacactttattttatacagactctggctccacaaaaaggttaaaaattagccaggtgcagtggtgcacatctgcggccccagctactcaggaggctgaggcagaaggattgcttgagctcggatggtcagggctgcaatgagctatgatcacacatcacatcaatgcactccagcctgggcaacggagtgagaccctgtctctaaaagaatagaagaggctggccgcggtggctcacgcctgtcatcctaccactttgggagaccaaggcgagtggatcatttgaggccaggtgttcaagaccagcctggtcaacatggcgaaaccccatctcttggcaggcgactgtaatcccagctactcaggaggctgagataggagactcccttgaaccgacgaggcggaggttgcagtgagcgaagatcacaccactgcactccagcctgggcaacagagcaaggctcggtctcccaaaaaaaaaaaaaaaaaagacacatggaagtaatttaaaaacacttaggaagatgtcatttcttcctatcaaggcgtcctccctttatgttttgtcgttatattgggaacgataaaaaaaatccttttttccgacccatgtggaccaggctggcctcgaactcgtgccctggaacccccgcctccgtgagggcccgagggcaggcgcaaccggcctgagccacaatggctccgggtgtcggggctgtcctttagtccctttgatcttacgcagggtgagggagccaatcaccagaggctcccccctgtcgtcacccagtccccagggccagtgagggccctgcgttccatggcgccccctggagggaggaaggggaactgtatctgagagttcagtatctgacaataaggaaaaggcatggtagatcagatggtgcctagtgttctggggagaagaaacaacggggttggggaatgcggagttgcagtttataatacaggcctcatgtataaggcagacctcatggggaaggtaacatctgtgcagagaaatggagatgagggctaggagccatgcaaatactggaacatgcttgccagcagaagtcgagaaacaaggctggcgcagtggcccacacctgtaatcccaggactttgggaggccgaggcaggtagatcacgaggtcagcagttcgagaccagcctggccaacatggtgaaaccctgtctctactaaaaatacaaaaattagctgggtgtggtggcacacgcctgtaatcccagccacttgggaggctgaggcaggagaatcgcttgaatccaggaggcagaggtttcagtgagccaagatcacgccactgcactccagcccgggcgacacagtgaggctgcgtctcaaaaaaaaaaaaaaaaaaaaaaaattgccccttcttaagtttgcatttagatctcttctcctttgaccacttttaatttatcttcacttctgatatgacatttaatttttcattcattttctgtctattattgttcgttttttaacttaaaaaaaaattctgtactttatgaatttctgtttcaaggtgtttttcccatctccaaatgcttatttggaaatgtttcctttcctcttggttcatttcttctggtgtgtgtgtgcgcgcgcccgcgtgcatgtgtgtactcgggtctcattttctgctttcttcctgcagtacctcgtttatgggagatgcacttcgcttttcttatttttttagtagagagggggtttcactggtttagccagaacagtctcgatctcctgacctcgtgatccgcccacctcgggctcccaaagtgctgggattccaggagtgagccaccgcgcccggccgtccactttgcttcttgcagaggctgatggtttgagtaatttccgagattcatagctcgagcgcgccctgttctgtctatgcagtgaagggcagctttttgcatccacggctttttgttggcaaggaggaatgtgcagtggccagatttgtttcttccccttttgttgctgttgttgttgttgctgctgctgttattgttgttgttgttgtattttattttgtagcatcctaaagtgtcccctccttctatttcttatccttatccaggtagggtttagaaaagctaacttcaggggcaggggagagagagaaagagaggaagagaaaatgagaatgaatgacaatacatgaacccatgggtcaacctttatttcaaggcagcccaaaaggacggctctcccttctctttcactctcttctctaggtgtgaagctgatgcagcacaggcgagccccaaaattgaggcttagcccgggggggttcttggcttctcctagaaactaattcaagaagccgggcgcagtggctcacgcctgtaatcccagcactttgggaggctgaggcggatggatcacttgaggtaaggagttcgagaccagcctggccaacatggtgaaaccccatctctactaaatatacaaaaattacccgggcatggggacgggtgcctgtaatcccagctgttcaggaggctgaggcaggggaatcgcttgaacccgggaggcggaggttgcagtgaacagagatcgtgtcactgcactccagcctgggtgatagagtgcgactccgtctgaaaaaaaaaaaaagaattcaagggcaggccggtggttttagacggcaacctttaccgaagcctcagtgcacagccacagcagagggacacacacctgtatcttttctaagactgggagaattttacaattgcttgactaattgaacagtgcctcgaggatgttacactaggttataaataaattcctgccgtgtttagctgaggcacgaacacaatgcccactgacaattccactttcctcgagggccattctttatgaaaggctgtaggagttccacgacattgttgattcctggattctccaagtctctagaacttgagaactacttttgtgtatttttttaagttcagagtttctaatgtccgttttatactactataaaatggtactatgtattctttattgatggtactatttacactttattttatacagactctggctccacaaaaaggttaaaaattagccaggtgcagtggtgcacatctgcggccccagctactcaggaggctgaggcagaaggattgcttgagctcggatggtcagggctgcaatgagctatgatcacacatcacatcaatgcactccagcctgggcaacagagtgagaccctgtctctaaaagaatagaagaggctgggcgcggtggctcacgcctgtcatcctaccactttgggagaccaaggcgagtggatcatttgaggccaggtgttcaagaccagcctggtcaacatggcgaaaccccatctcttggcaggcgactgtaatcccagctactcaggaggctgagataggagactcccttgaaccgacgaggcggaggttgcagtgagcgaagatcacaccactgcactccagcctgggcaacagagcaaggctcggtctcccaaaaaaaaaaaaaaaaaaaaagacacatggaagtaatttaaaaacacttaggaagatgtcatttcttcctatcaaggcgtcctccctttatgttttgtcgttatattgggaacgataaaaaaaatccttttttccgacccatgtggaccaggctggcctcgaactcgtgccctggaacccccgcctccgtgagggcccgagggcaggcgcaaccggcctgagccacaatggctccgggtgtcggggctgtcctttagtccctttgatcttacgcagggtgagggagccaatcaccagaggctcccccctgtcgtcacccagtccccagggccagtgagggccctgcgttccatggcgccccctggagggaggaaggggaactgtatctgagagttcagtatctgacaataaggaaaaggcatagtagatcagatggtgcctagtgttctggggagaagaaacaacggggttggggaatgcggagttgcagtttataatacaggcctcatgtataaggcagacctcatggggaaggtaacatctgtgcagagaaatggagatgagggctaggagccatgcaaatactggaacatgcttgccagcagaagtcgagaaacatggccggcgcagtggcccacacctgtaatcccaggactttgggaggccgaggcaggtagatcacgaggtcagcagttcgagaccagcccggccaacatggtgaaaccctgtctctactaaaaatacaaaaattagctgggtgtggtggcacacgcctgtaatcccagccacttgggagggtgaggtaggagaatcgcttgaacctgggaggtagaggttgcagtgatgcagtgagccgagaccacgccattgtactctcgcctgggcgacagagcgagactccatctcaaaaaaaaaaaaaaaaaaaaaaaaaaaaagcaaaaacaaacaggtgagattcattttgataaaatagctgatttaacctaatatacctaaaacatcataattttaacataatcaatagaaacatttttgcaagattttatgttattttttaccatacgacgtcttggaaatcttggtttggaccagccatgttcaactgctcagtagccatgtgtggccagaggcggccgtattggacagtgcagatggtgcatgagggtgttcgggcagtgggaacagccagtacagaggccctgtgggggcacatgcctgctgctacgggaacagtgaggagccccgtgtggctgcagtggagtgagagggagaaggtgggagatgtaaccaacagtctcatcattcattcattaaatccttttttttctttttttgagactgagtttcgctcttgttgcccaggctggagtgcaatggtgccatctcggctcaccacaacctccacctcttgagttcaagcgattctcctgcctcagccttccgagtagctgggattacaggcatgcgccaccatgcccggctaattttgtatttttagtagagctggggtttctccctgttggtcaggctggtctcgaactcccgacctcaggtgatctgcccgccttgacctcccaaagtgctgtgattacaggcttgagccactgctcccagtccattgaatgtgtgtatatatagttgaataaagaagacaccggagtttgttctgtatcttctcctttcaaattctgtgccatttgaattttttcctattccttttatatatttttaattgacaaattgtacatatttatcatgtacatattgttttgaaatatgtatataccgtagaatggctaaatcaagatcattaacatatgtattactttacctattttccttttttcgttgtgtctctgccaggtttcggtatcagaatgactctgacctcatagaatgagttagagagcagttgctcctcctcaattgtgtggaataatttcagtaggattagtgccgccttttctttacacgtctggtaggattcgactgtgaatccgtctagtctaaggttttttgtgctggttggtaggttttgtatgactaactcaattttggaactcatcgttggtttgttcagggtttccatttcttcctggttcaatcttgagaggttttatgtttccaggaatttctctatttcttctagttttctagtttgtgtgcatagaggcatgtggaatagtctcagggtttcttgtatatctgtgggtcagtggtaatgtcacctttgtcatttctgattgtgtttatttggatcttgtctttttttctttattaatctagctagtggtcttcccatgttatttatgctttcaaaaatatcaactttgtatgaattaacagcatttgccgtgacctggatgagaccggagactgttattctaagtgaagtaagtcaggaatggaaaaccaaacatcgtatgttctcactgatatgtgggagctaagctatgaggacgcaaaggcgtaagaatgatacaatggactttggggacttagggggacgagttggcgggggcgagggataaaatacaacaagtagggtgtagtgtatactgctcaggtgatgggtgcaccaaaatcacaaatcaccactaaagagcttatgtaaccacacaccacctgtaccccaataatttatggaataaataataaataaataatttttttaaaaaatcaactttgggtttcattgatcttttgtatggttttttacgtctccatttcattcaggtcagctccgatgttggtttttttttttcttctgctagctttggggttgatttgctcttgtttttctaattcctctaggtgtgatgttaggcggttcatttgagatctttctagcttcttagtgtagccctttagcactagaaacttcctttgagcactgttctagctgtgtcccagagattctgggatgttgtatgtttgttttcattagtttcagataatttttttatttctgccttaatttcagtctttacccaaaagtcatttggaagcaggttgtttaatttccatgatgactctaggccgggcatggtggctcatgcctgtaatcccagccacttgggaggctgaggcaggagaatcgcttgaatccaggaggcagaggtttcagtgagccaagatcacgccactgcactccagcccgggcgacagagtgaggctgcgtctcaaaaaaaaaaaaaaaaaaaaaaaattgccccttcttaagtttgcatttagatctcttctcctttgaccacttttaatttatcttcacttctgatatgacatttaatttttcattcattttctgtctattattgttccttttttaacttaaaaaaaattctgtactttatgaatttctgtttcaaggtgtttttcccatctccaaatgcttatttgaaaatgtttcctttcctcttggttcatttcttctggtgtgtgtgtgcgcgcgcccgcgtgcatgtgtgtactcgggtctcattttctgctttcttcctgcagtacctcgtttatgggagatgcacttcgcttttgttatttttttagtagagagggggtttcactggtttagccagaacagtctcgatctcctgacctcgtgatccgcccacctcgggctcccaaagtgctgggattccaggagtgagccaccgcgcccggccgtccactttgcttcttgcagaggctgatggtttgagtaatttccgagattcatagctcgagcgcgccctgttctgtctatgcagtgaagggcagctttttgcatccacggctttttgttggcaaggaggaatgtgcagtggccagatttgtttcttccccttttgttgctgttgttgttgttgctgctgctgttattgttgttgttgttgtattttattttgtagcatcctaaagtgtcccctccttctatttcttatccttatccaggtagggtttagaaaagctaacttcaggggcaggggagagagagaaagagaggaagagaaaatgagaatgaatgacaatacatgaacccatgggtcaacctttatttcaaggcagcccaaaaggacggctctcccttctctttcactctcttctctaggtgtgaagctgatgcagcacaggcgagccccaaaattgaggcttagcccgggggggttcttggcttctcctagaaactaattcaagaagccgggcgcagtggctcacgcctgtaatcccagcactttgggaggctgaggcggatggatcacttgaggtaaggagttcgagaccagcctggccaacatgctgaaaaccccatctctactaaatatacaaaaattacccgggcatggggacgggtgcctgtaatcccagctgttcaggaggctgaggcaggggaatcgcttgaacccgggaggcggaggttgcagtgaacagagatcgtgtcactgcactccagcctgggtgatagagtgcgactccgtctgaaaaaaaaaaaaaaagaattcaagggccggccggtggttttagacggcaacctttaccgaagcctcagtgcacagccacagcagagggacacacacctgtatcttttctaagactgggagaattttacaattgcttgactaattgaacagtgcctcgaggatgttacactaggttataaataaattcctgccgtgtttagctgaggcacgaacacaatgcccactgacaattccactttcctcgagggccattctttatgaaaggctgtaggagttccacgacattgttgattcctggattctccaagtctctagaacttgagaactacttttgtgtatttttttaacctttaagttcagagtttctaatgtccgttttatactactataaaatggtactatgtattctttattgatggtactatttacactttattttatacagactctggctccacaaaaaggttaaaaattagccaggtgcagtggtgcacatctgcggccccagctactcaggaggctgaggcagaaggattgcttgagctcggatggtcagggctgcaatgagctatgatcacacatcacatcaatgcactccagcctgggcaacagagtgagaccctgtctctaaaagaatagaagaggctgggcgcggtggctcacgcctgtcatcctaccactttgggagaccaaggcgagtggatcatttgaggccaggtgttcaagaccagcctggtcaacatggcgaaaccccatctcttggcaggcgactgtaatcccagctactcaggaggctgagataggagactcccttgaaccgacgaggcggaggttgcagtgagcgaagatcacaccactgcactccagcctgggcaacagagcaaggctcggtctcccaaaaaaaaaaaaaaaaaaaaagacacatggaagtaatttaaaaacacttaggaagatgtcatttcttcctatcaaggcgtcctccctttatgttttgtcgttatattgggaacgataaaaaaaatccttttttccgacccatgtggaccaggctggcctcgaactcgtgccctggaacccccgcctccgtgagggcccgagggcaggcgcaaccggcctgagccacaatggctccgggtgtcggggctgtcctttagtccctttgatcttacgcagggtgagggagccaatcaccagaggctcccccctgtcgtcacccagtccccagggccagtgagggccctgcgttccatggcgccccctggagggaggaaggggaactgtatctgagagttcagtatctgacaataaggaaaaggcatagtagatcagatggtgcctagtgttctggggagaagaaacaacggggttggggaatgcggagttgcagtttataatacaggcctcatgtataaggcagacctcatggggaaggtaacatctgtgcagagaaatggagatgagggctaggagccatgcaaatactggaacatgcttgccagcagaagtcgagaaacatggccggcgcagtggcccacacctgtaatcccaggactttgggaggccgaggcaggtagatcacgaggtcagcagttcgagaccagcccggccaacatggtgaaaccctgtctctactaaaaatacaaaaattagctgggtgtggtggcacacgcctgtaatcccagccacttgggagggtgaggtaggagaatcgcttgaacctgggaggtagaggttgcagtgatgcagtgagccgagaccacgccattgtactctcgcctgggcgacagagcgagactccatctcaaaaaaaaaaaaaaaaaaaaaaaaaaaaagcaaaaacaaacaggtgagattcattttgataaaatagctgatttaacctaatatacctaaaacatcataattttaacataatcaatagaaacatttttgcaagattttatgttattttttaccatacgacgtcttggaaatcttggtttggaccagccatgttcaactgctcagtagccatgtgtggccagaggcggccgtattggacagtgcagatggtgcatgagggtgttcgggcagtgggaacagccagtacagaggccctgtgggggcacatgcctgctgctacgggaacagtgaggagccccgtgtggctgcagtggagtgagagggagaaggtgggagatgtaaccaacagtctcatcattcattcattaaatccttttttttctttttttgagactgagtttcgctcttgttgcccaggctggagtgcaatggtgccatctcggctcaccacaacctccacctcttgagttcaagcgattctcctgcctcagccttccgagtagctgggattacaggcatgcgccaccatgcccggctaattttgtatttttagtagagctggggtttctccctgttggtcaggctggtctcgaactcccgacctcaggtgatctgcccgccttgacctcccaaagtgctgtgattacaggcttgagccactgctcccagtccattgaatgtgtgtatatatagttgaataaagaagacaccggagtttgttctgtatcttctcctttcaaattctgtgccatttgaattttttcctattccttttatatatttttaattgacaaattgtacatatttatcatgtacatattgttttgaaatatgtatataccgtagaatggctaaatcaagatcattaacatatgtattactttacctattttccttttttcgttgtgtctctgccaggtttcggtatcagaatgactctgacctcatagaatgagttagagagcagttgctcctcctcaattgtgtggaataatttcagtaggattggtgccgccttttctttacacgtctggtaggattcgactgtgaatccgtctagtctaaggttttttgtgctggttggtaggttttgtatgactaactcaattttggaactcatcgttggtttgttcagggtttccatttcttcctggttcaatcttgagaggttttatgtttccaggaatttctctatttcttctagttttctagtttgtgtgcatagaggcatgtggaatagtctcagggtttcttgtatatctgtgggtcagtggtaatgtcacctttgtcatttctgattgtgtttatttggatcttgtctttttttctttattaatctagctagtggtcttcccatgttatttatgctttcaaaaatatcaactttgtatgaattaacagcatttgccgtgacctggatgagaccggagactgttattctaagtgaagtaagtcaggaatggaaaaccaaacatcgtatgttctcactgatatgtgggagctaagctatgaggacgcaaaggcgtaagaatgatacaatggactttggggacttagggggacgagttggcgggggcgagggataaaatacaacaagtagggtgtagtgtatactgctcaggtgatgggtgcaccaaaatcacaaatcaccactaaagagcttatgtaaccacacaccacctgtaccccaataatttatggaataaataataaataaataatttttttaaaaaatcaactttgggtttcattgatcttttgtatggttttttacgtctccatttcattcaggtcagctccgatgttggtttttttttttcttctgctagctttggggttgatttgctcttgtttttctaattcctctaggtgtgatgttaggcggttcatttgagatctttctagcttcttagtgtagccctttagcactagaaacttcctttgagcactgttctagctgtgtcccagagattctgggatgttgtatgtttgttttcattagtttcagataatttttttatttctgccttaatttcagtctttacccaaaagtcatttggaagcaggttgtttaatttccatgatgactctaggccgggcatggtggctcatgcctgtaatcccagccacttgggaggctgaggcaggagaatcgcttgaatccaggaggcagaggtttcagtgagccaagatcacgccactgcactccagcccgggcgacagagtgaggctgcgtctcaaaaaaaaaaaaaaaaaaaaaaattgccccttcttaagtttgcatttagatctcttctcctttgaccacttttaatttatcttcacttctgatatgacatttaatttttcattcattttctgtctattattgttccttttttaacttaaaaaaaattctgtactttatgaatttctgtttcaaggtgtttttcccatctccaaatgcttatttgaaaatgtttcctttcctcttggttcatttcttctggtgtgtgtgtgcacgcgcccgcgtgcatgtgtgtactcgggtctcattttctgctttcttcctgcagtacctcgtttatgggagatgcacttcgcttttgttatttttttagtagagagggggtttcactggtttagccagaacagtctcgatctcctgacctcgtgatccgcccacctcgggctcccaaagtgctgggattccaggagtgagccaccgcgcccggccgtccactttgcttcttgcagaggctgatggtttgagtaatttccgagattcatagctcgagcgcgccctgttctgtctatgcagtgaagggcagctttttgcatccacggctttttgttggcaaggaggaatgtgcagtggccagatttgtttcttccccttttgttgctgttgttgttgttgctgctgctgttattgttgttgttgttgtattttattttgtagcatcctaaagtgtcccctccttctatttcttatccttatccaggtagggtttagaaaagctaacttcaggggcaggggagagagagaaagagaggaagagaaaatgagaatgaatgacaatacatgaacccatgggtcaacctttatttcaaggcagcccaaaaggacggctctcccttctctttcactctcttctctaggtgtgaagctgatgcagcacaggcgagccccaaaattgaggcttagcccgggggggttcttggcttctcctagaaactaattcaagaagccgggcgcagtggctcacgcctgtaatcccagcactttgggaggctgaggcggatggatcacttgaggtaaggagttcgagaccagcctggccaacatgctgaaaaccccatctctactaaatatacaaaaattacccgggcatggggacgggtgcctgtaatcccagctgttcaggaggctgaggcaggggaatcgcttgaacccgggaggcggaggttgcagtgaacagagatcgtgtcactgcactccagcctgggtgatagagtgcgactccgtctgaaaaaaaaaaaaaaagaattcaagggccggccggtggttttagacggcaacctttaccgaagcctcagtgcacagccacagcagagggacacacacctgtatcttttctaagactgggagaattttacaattgcttgactaattgaacagtgcctcgaggatgttacactaggttataaataaattcctgccgtgtttagctgaggcacgaacacaatgcccactgacaattccactttcctcgagggccattctttatgaaaggctgtaggagttccacgacattgttgattcctggattctccaagtctctagaacttgagaactacttttgtgtatttttttaacctttaagttcagagtttctaatgtccgttttatactactataaaatggtactatgtattctttattgatggtactatttacactttattttatacagactctggctccacaaaaaggttaaaaattagccaggtgcagtggtgcacatctgcggccccagctactcaggaggctgaggcagaaggattgcttgagctcggatggtcagggctgcaatgagctatgatcacacatcacatcaatgcactccagcctgggcaacagagtgagaccctgtctctaaaagaatagaagaggctgggcgcggtggctcacgcctgtcatcctaccactttgggagaccaaggcgagtggatcatttgaggccaggtgttcaagaccagcctggtcaacatggcgaaaccccatctcttggcaggcgactgtaatcccagctactcaggaggctgagataggagactcccttgaaccgacgaggcggaggttgcagtgagcgaagatcacaccactgcactccagcctgggcaacagagcaaggctcggtctcccaaaaaaaaaaaaaaaaaaaagacacatggaagtaatttaaaaacacttaggaagatgtcatttcttcctatcaaggcgtcctccctttatgttttgtcgttatattgggaacgataaaaaaaatccttttttccgacccatgtggaccaggctggcctcgaactcgtgccctggaacccccgcctccgtgagggcccgagggcaggcgcaaccggcctgagccacaatggctccgggtgtcggggctgtcctttagtccctttgatcttacgcagggtgagggagccaatcaccagaggctcccccctgtcgtcacccagtccccagggccagtgagggccctgcgttccatggcgccccctggagggaggaaggggaactgtatctgagagttcagtatctgacaataaggaaaaggcatagtagatcagatggtgcctagtgttctggggagaagaaacaacggggttggggaatgcggagttgcagtttataatacaggcctcatgtataaggcagacctcatggggaaggtaacatctgtgcagagaaatggagatgagggctaggagccatgcaaatactggaacatgcttgccagcagaagtcgagaaacatggccggcgcagtggcccacacctgtaatcccaggactttgggaggccgaggcaggtagatcacgaggtcagcagttcgagaccagcccggccaacatggtgaaaccctgtctctactaaaaatacaaaaattagctgggtgtggtggcacacgcctgtaatcccagccacttgggagggtgaggtaggagaatcgcttgaacctgggaggtagaggttgcagtgatgcagtgagccgagaccacgccattgtactctcgcctgggcgacagagcgagactccatctcaaaaaaaaaaaaaaaaaaaaaaaaaaagcaaaaacaaacaggtgagattcattttgataaaatagctgatttaacctaatatacctaaaacatcataattttaacataatcaatagaaacatttttgcaagattttatgttattttttaccatacgacgtcttggaaatcttggtttggaccagccatgttcaactgctcagtagccatgtgtggccagaggcggccgtattggacagtgcagatggtgcatgagggtgttcgggcagtgggaacagccagtacagaggccctgtgggggcacatgcctgctgctacgggaacagtgaggagccccgtgtggctgcagtggagtgagagggagaaggtgggagatgtaaccaacagtctcatcattcattcattaaatccttttttttctttttttgagactgagtttcgctcttgttgcccaggctggagtgcaatggtgccatctcggctcaccacaacctccacctcttgagttcaagcgattctcctgcctcagccttccgagtagctgggattacaggcatgcgccaccatgcccggctaattttgtatttttagtagagctggggtttctccctgttggtcaggctggtctcgaactcccgacctcaggtgatctgcccgccttgacctcccaaagtgctgtgattacaggcttgagccactgctcccagtccattgaatgtgtgtatatatagttgaataaagaagacaccggagtttgttctgtatcttctcctttcaaattctgtgccatttgaattttttcctattccttttatatatttttaattgacaaattgtacatatttatcatgtacatattgttttgaaatatgtatataccgtagaatggctaaatcaagatcattaacatatgtattactttacctattttccttttttcgttgtgtctctgccaggtttcggtatcagaatgactctgacctcatagaatgagttagagagcagttgctcctcctcaattgtgtggaataatttcagtaggattggtgccgccttttctttacacgtctggtaggattcgactgtgaatccgtctagtctaaggttttttgtgctggttggtaggttttgtatgactaactcaattttggaactcatcgttggtttgttcagggtttccatttcttcctggttcaatcttgagaggttttatgtttccaggaatttctctatttcttctagttttctagtttgtgtgcatagaggcatgtggaatagtctcagggtttcttgtatatctgtgggtcagtggtaatgtcacctttgtcatttctgattgtgtttatttggatcttgtctttttttctttattaatctagctagtggtcttcccatgttatttatgctttcaaaaatatcaactttgtatgaattaacagcatttgccgtgacctggatgagaccggagactgttattctaagtgaagtaagtcaggaatggaaaaccaaacatcgtatgttctcactgatatgtgggagctaagctatgaggacgcaaaggcgtaagaacgatacaatggactttggggacttagggggacgagttggcgggggcgagggataaaatacaacaagtagggtgtagtgtatactgctcaggtgatgggtgcaccaaaatcacaaatcaccactaaagagcttatgtaaccacacaccacctgtaccccaataatttatggaataaataataaataaataatttttttaaaaaatcaactttgggtttcattgatcttttgtatggttttttacgtctccatttcattcaggtcagctccgatgttggtttttttttttcttctgctagctttggggttgatttgctcttgtttttctaattcctctaggtgtgatgttaggcggttcatttgagatctttctagcttcttagtgtagccctttagcactagaaacttcctttgagcactgttctagctgtgtcccagagattctgggatgttgtatgtttgttttcattagtttcagataatttttttatttctgccttaatttcagtctttacccaaaagtcatttggaagcaggttgtttaatttccatgatgactctaggccgggcatggtggctcatgcctgtaatcccagccacttgggaggctgaggcaggagaatcgcttgaatccaggaggcagaggtttcagtgagccaagatcacgccactgcactccagcccgggcgacagagtgaggctgcgtctcaaaaaaaaaaaaaaaaaaaaaaaattgccccttcttaagtttgcatttagatctcttctcctttgaccacttttaatttatcttcacttctgatatgacatttaatttttcattcattttctgtctattattgttccttttttaacttaaaaaaaaattatgtactttatgaatttctgtttcaaggtgtttttcccatctccaaatgcttatttgaaaatgtttcctttcctcttggttcatttcttctggtgtgtgtgtgcgcgcgcccgcgtgcatgtgtgtactcgggtctcattttctgctttcttcctgcagtacctcgtttatgggagatgcacttcgcttttgttatttttttagtagagagggggtttcactggtttagccagaacagtctcgatctcctgacctcgtgatccgcccacctcgggctcccaaagtgctgggattccaggagtgagccaccgcgcccggccgtccactttgcttcttgcagaggctgatggtttgagtaatttccgagattcatagctcgagcgcgccctgttctgtctatgcagtgaagggcagctttttgcatccacggctttttgttggcaaggaggaatgtgcagtggccagatttgtttcttccccttttgttgctgttgttgttgttgctgctgctgttattgttgttgttgttgtattttattttgtagcatcctaaagtgtcccctccttctatttcttatccttatccaggtagggtttagaaaagctaacttcaggggcaggggagagagagaaagagaggaagagaaaatgagaatgaatgacaatacatgaacccatgggtcaacctttatttcaaggcagcccaaaaggacggctctcccttctctttcactctcttctctaggtgtgaagctgatgcagcacaggcgagccccaaaattgaggcttagcccgggggggttcttggcttctcctagaaactaattcaagaagccgggcgcagtggctcacgcctgtaatcccagcactttgggaggctgaggcggatggatcacttgaggtaaggagttcgagaccagcctggccaacatgctgaaaaccccatctctactaaatatacaaaaattacccgggcatggggacgggtgcctgtaatcccagctgttcaggaggctgaggcaggggaatcgcttgaacccgggaggcggaggttgcagtgaacagagatcgtgtcactgcactccagcctgggtgatagagtgcgactccgtctgaaaaaaaaaaaaaagaattcaagggccggccggtggttttagacggcaacctttaccgaagcctcagtgcacagccacagcagagggacacacacctgtatcttttctaagactgggagaattttacaattgcttgaataattgaacagtgcctcgaggatgttacactaggttataaataaattcctgccgtgtttagctgaggcacgaacacaatgcccactgacaattccactttcctcgagggccattctttatgaaaggctgtaggagttccacgacattgttgattcctggattctccaagtctctagaacttgagaactacttttgtgtatttttttaacctttaagtccagagtttctaatgtccgttttatactactataaaatggtactatgtattctttatttatggtactatttacactttattttatacagactctggctccacaaaaaggttaaaaattagccaggtgcagtggtgcacatctgcggccccagctactcaggaggctgaggcagaaggattgcttgagctcggatggtcagggctgcaatgagctatgatcacacatcacatcaatgcactccagcctgggcaacagagtgagaccctgtctctaaaagaatagaagaggctgggcgcggtggctcacgcctgtcatcctaccactttgggagaccaaggcgagtggatcatttgaggccaggtgttcaagaccagcctggtcaacatggcgaaaccccatctcttggcaggcgactgtaatcccagctactcaggaggctgagataggagactcccttgaaccgacgaggcggaggttgcagtgagcgaagatcacaccactgcactccagcctgggcaacagagcaaggctcggtctccccaaaaaaaaaaaaaaaaaaaaaagacacatggaagtaatttaaaaacacttaggaagatgtcatttcttcctatcaaggcgtcctccctttatgttttgtcgttatattgggaacgataaaaaaaatccttttttccgacccatgtggaccaggctggcctcgaactcgtgccctggaacccccgcctccgtgagggcccgagggcaggcgcaaccggcctgagccacaatggctccgggtgtcggggctgtcctttagtccctttgatcttacgcagggtgagggagccaatcaccagaggctcccccctgtcgtcacccagtccccagggccagtgagggccctgcgttccatggcgccccctggagggaggaaggggaactgtatctgagagttcagtatctgacaataaggaaaaggcatagtagatcagatggtgcctagtgttctggggagaagaaacaacggggttggggaatgcggagttgcagtttataatacaggcctcatgtataaggcagacctcatggggaaggtaacatctgtgcagagaaatggagatgagggctaggagccatgcaaatactggaacatgcttgccagcagaagtcgagaaacatggccggcgcagtggcccacacctgtaatcccaggactttgggaggccgaggcaggtagatcacgaggtcagcagttcgagaccagcccggccaacatggtgaaaccctgtctctactaaaaatacaaaaattagctgggtgtggtggcacacgcctgtaatcccagccacttgggagggtgaggtaggagaatcgcttgaacctgggaggtagaggttgcagtgatgcagtgagccgagaccacgccattgtactctcgcctgggcgacagagcgagactccatctcaaaaacaaacaaacaaaaaaaaaaagcaaaaacaaacaggtgagattcattttgataaaatagctgatttaacctaatatacctaaaacatcataattttaacataatcaatagaaacgtttttgcaagattttatgttattttttaccgtacgacgtcttggaaatcttggtttggaccagccatgttcaactgctcagtagccatgtgtggccagaggcggccgtattggacagtgcagatggtgcatgagggtgttcgggcagtgggaacagccagtacagaggccctgtgggggcacatgcctgctgctacgggaacagtgaggagccccgtgtggctgcagtggagtgagagggagaaggtgggagatgtaaccaacagtctcatcattcattcattaaatccttttttttctttttttgagactgagtttcgctcttgttgcccaggctggagtgcaatggtgccatctcggctcaccacaacctccacctcttgagttcaagcgattctcctgcctcagccttccgagtagctgggattacaggcatgcgccaccatgcccggctaattttgtatttttagtagagctggggtttctccctgttggtcaggctggtctcgaactcccgacctcaggtgatctgcccgccttgacctcccaaagtgctgtgattacaggcttgagccactgctcccagtccattgaatgtgtgtatatatagttgaataaagaagacaccggagtttgttctgtatcttctcctttcaaattctgtgccatttgaattttttcctattccttttatatatttttaattgacaaattgtacatatttatcatgtacatattgttttgaaatatgtatataccgtagaatggctaaatcaagatcattaacatatgtattactttacctattttccttttttcgttgtgtctctgccaggtttcggtatcagaatgactctgacctcatagaatgagttagagagcagttgctcctcctcaattgtgtggaataatttcagtaggattggtgccgccttttctttacacatctggtaggattcgactgtgaatccgtctagtctaaggttttttgtgctggttggtaggttttgtatgactaactcaattttggaactcatcgttggtttgttcagggtttccatttcttcctggttcaatcttgagaggttttatgtttccaggaatttctctatttcttctagttttctagtttgtgtgcatagaggcatgtggaatagtctcagggtttcttgtatatctctgggtcagtggaaatgtcacctttgtcatttctgattgtgtttatttggatcttgtctttttttctttattaatctagctagtggtcttcccatgttatttatgctttcaaaaatatcaactttgtatgaattaacagcatttgccgtgacctggatgagaccggagactgttattctaagtgaagtaactcaggaatggaaaaccaaacatcgtatgttctcactgatatgtgggagctaagctatgaggacgcaaaggcgtaagaatgatacaatggactttggggacttagggggacgagttggcgggggcgagggataaaatacaacaagtagggtgtagtgtatactgctcaggtgatgggtgcaccaaaatcacaaatcaccactaaagagcttatgtaaccacacaccacctgtaccccaataatttatggaataaataataaataaataatttttttaaaaaatcaactttgggtttcattgatcttttgtatggttttttacgtctccatttcattcaggtcagctccgatgttggttttttttttttcttctgctagctttggggttgatttgctcttgtttttctaattcctctaggtgtgatgttaggcggttcatttgagatctttctagcttcttagtgtagccctttagcactagaaacttcctttgagcactgttctagctgtgtcccagagattctgggatgttgtatgtttgttttcattagtttcagataatttttttatttctgccttaatttcagtctttacccaaaagtcatttggaagcaggttgtttaatttccatgatgactctaggccgggcatggtggctcatgcctgtaatcccagccacttgggaggctgaggcaggagaatcgcttgaatccaggaggcagaggtttcagtgagccaagatcacgccactgcactccagcccgggcgacagagtgaggctgcgtctcaaaaaaaaaaaaaaaaaaaaaaaaaattgccccttcttaagtttgcatttagatctcttctcctttgaccacttttaatttatcttcacttctgatatgacatttaatttttcattcattttctgtctattattgttccttttttaacttaaaaaaaaattctgtactttatgaatttctgtttcaaggtgtttttcccatctccaaatgcttatttgaaaatgtttcctttcctcttggttcatttcttctggtgtgtgtgtgcgcgcgcccgcgtgcatgtgtgtactcgggtctcattttctgctttcttcctgcagtacctcgtttatgggagatgcacttcgcttttgttatttttttagtagagagggggtttcactggtttagccagaacagtctcgatctcctgacctcgtgatccgcccacctcgggctcccaaagtgctgggattccaggagtgagccaccgcgcccggccgtccactttgcttcttgcagaggctgatggtttgagtaatttccgagattcatagctcgagcgcgccctgttctgtctatgcagtgaagggcagctttttgcatccacggctttttgttggcaaggaggaatgtgcagtggccagatttgtttcttccccttttgttgctgttgttgttgttgtattttattttgtagcatcctaaagtgtcccctccttctatttcttatccttatccaggtagggtttagaaaagctaacttcaggggcaggggagagagagaaagagaggaagagaaaatgagaatgaatgacaatacatgaacccatgggtcaacctttatttcaaggcagcccaaaaggacggctctcccttctctttcactctcttctctgcgtgtgaagctgatgcagcacaggcgagccccaaaattgaggcttagcccgggggggttcttggcttctcctagaaactaattcaagaagccgggcgcagtggctcacgcctgtaatcccagcactttgggaggctgaggcggatggatcacttgaggtaaggagttcgagaccagcctggccaacatggtgaaaccccatctctactaaatatacaaaaattacccgggcatggggacgggtgcctgtaatcccagctgttcaggaggctgaggcaggggaatcgcttgaacccgggaggcggaggttgcagtgaacagagatcgtgtcactgcactccagcctgggtgatagagtgcgactccgtctgaaaaaaaaaaaaaaagaattcaagggccggccggtggttttagacggcaacctttaccgaagcctcagtgcacagccacagcagagggacacacacctgtatcttttctaagactgggagaattttacaattgcttgactaattgaacagtgcctcgaggatgttacactaggttataaataaattcctgccgtgtttagctgaggcacgaacacaatgcccactgacaattccactttcctcgagggccattctttatgaaaggctgtaggagttccacgacattgttgattcctggattctccaagtctctagaacttgagaactacttttgtgtatttttttaacctttaagtccagagtttctaatgtccgttttatactactataaaatggtactatgtattctttatttatggtactatttacactttattttatacagactctggctccacaaaaaggttaaaaattagccaggtgcagtggtgcacatctgcggccccagctactcaggaggctgaggcagaaggattgcttgagctcggatggtcagggctgcaatgagctatgatcacacatcacatcaatgcactccagcctgggcaacagagtgagaccctgtctctaaaagaatagaagaggctgggcgcggtggctcacgcctgtcatcctaccactttgggagaccaaggcgagtggatcatttgaggccaggtgttcaagaccagcctggtcaacatggcgaaaccccatctcttggcaggcgactgtaatcccagctactcaggaggctgagataggagactcccttgaaccgacgaggcggaggttgcagtgagcgaagatcacaccactgcactccagcctgggcaacagagcaaggctcggtctccccaaaaaaaaaaaaaaaaaaaaaagacacatggaagtaatttaaaaacacttaggaagatgtcatttcttcctatcaaggcgtcctccctttatgttttgtcgttatattgggaacgataaaaaaaatccttttttccgacccatgtggaccaggctggcctcgaactcgtgccctggaacccccgcctccgtgagggcccgagggcaggcgcaaccggcctgagccacaatggctccgggtgtcggggctgtcctttagtccctttgatcttacgcagggtgagggagccaatcaccagaggctcccccctgtcgtcacccagtccccagggccagtgagggccctgcgttccatggcgccccctggagggaggaaggggaactgtatctgagagttcagtatctgacaataaggaaaaggcatagtagatcagatggtgcctagtgttctggggagaagaaacaacggggttggggaatgcggagttgcagtttataatacaggcctcatgtataaggcagacctcatggggaaggtaacatctgtgcagagaaatggagatgagggctaggagccatgcaaatactggaacatgcttgccagcagaagtcgagaaacatggccggcgcagtggcccacacctgtaatcccaggactttgggaggccgaggcaggtagatcacgaggtcagcagttcgagaccagcccggccaacatggtgaaaccctgtctctactaaaaatacaaaaattagctgggtgtggtggcacacgcctgtaatcccagccacttgggagggtgaggtaggagaatcgcttgaacctgggaggtagaggttgcagtgatgcagtgagccgagaccacgccattgtactctcgcctgggcgacagagcgagactccatctcaaaaaaaaaaaaaaaaaaaaaaaaaaaaaaaagcaaaaacaaacaggtgagattcattttgataaaatagctgatttaacctaatatacctaaaacatcataattttaacataatcaatagaaacgtttttgcaagattttatgttattttttaccgtacgacgtcttggaaatcttggtttggaccagccatgttcaactgctcagtagccatgtgtggccagaggcggccgtattggacagtgcagatggtgcatgagggtgttcgggcagtgggaacagccagtacagaggccctgtgggggcacatgcctgctgctacgggaacagtgaggagccccgtgtggctgcagtggagtgagagggagaaggtgggagatgtaaccaacagtctcatcattcattcattaaatccttttttttctttttttgagactgagtttcgctcttgttgcccaggctggagtgcaatggtgccatctcggctcaccacaacctccacctcttgagttcaagcgattctcctgcctcagccttccgagtagctgggattacaggcatgcgccaccatgcccggctaattttgtatttttagtagagctggggtttctccctgttggtcaggctggtctcgaactcccgacctcaggtgatctgcccgccttgacctcccaaagtgctgtgattacaggcttgagccactgctcccagtccattgaatgtgtgtatatatagttgaataaagaagacaccggagtttgttctgtatcttctcctttcaaattctgtgccatttgaattttttcctattccttttatatatttttaattgacaaattgtacatatttatcatgtacatattgttttgaaatatgtatataccgtagaatggctaaatcaagatcattaacatatgtattactttacctattttccttttttcgttgtgtctctgccaggtttcggtatcagaatgactctgacctcatagaatgagttagagagcagttgctcctcctcaattgtgtggaataatttcagtaggattggtgccgccttttctttacacatctggtaggattcgactgtgaatccgtctagtctaaggttttttgtgctggttggtaggttttgtatgactaactcaattttggaactcatcgttggtttgttcagggtttccatttcttcctggttcaatcttgagaggttttatgtttccaggaatttctctatttcttctagttttctagtttgtgtgcatagaggcatgtggaatagtctcagggtttcttgtatatctctgggtcagtggaaatgtcacctttgtcatttctgattgtgtttatttggatcttgtctttttttctttattaatctagctagtggtcttcccatgttatttatgctttcaaaaatatcaactttgtatgaattaacagcatttgccgtgacctggatgagaccggagactgttattctaagtgaagtaactcaggaatggaaaaccaaacatcgtatgttctcactgatatgtgggagctaagctatgaggacgcaaaggcgtaagaatgatacaatggactttggggacttagggggacgagttggcgggggcgagggataaaatacaacaagtagggtgtagtgtatactgctcaggtgatgggtgcaccaaaatcacaaatcaccactaaagagcttatgtaaccacacaccacctgtaccccaataatttatggaataaataataaataaataatttttttaaaaaatcaactttgggtttcattgatcttttgtatggttttttacgtctccatttcattcaggtcagctccgatgttggttttttttttttcttctgctagctttggggttgatttgctcttgtttttctaattcctctaggtgtgatgttaggcggttcatttgagatctttctagcttcttagtgtagccctttagcactagaaacttcctttgagcactgttctagctgtgtcccagagattctgggatgttgtatgtttgttttcattagtttcagataatttttttatttctgccttaatttcagtctttacccaaaagtcatttggaagcaggttgtttaatttccatgatgactctaggccgggcatggtggctcatgcctgtaatcccagccacttgggaggctgaggcaggagaatcgcttgaatccaggaggcagaggtttcagtgagccaagatcacgccactgcactccagcccgggcgacagagtgaggctgcgtctcaaaaaaaaaaaaaaaaaaaaaaaaaattgccccttcttaagtttgcatttagatctcttctcctttgaccacttttaatttatcttcacttctgatatgacatttaatttttcattcattttctgtctattattgttccttttttaacttaaaaaaaaattctgtactttatgaatttctgtttcaaggtgtttttcccatctccaaatgcttatttgaaaatgtttcctttcctcttggttcatttcttctggtgtgtgtgtgcgcgcgcccgcgtgcatgtgtgtactcgggtctcattttctgctttcttcctgcagtacctcgtttatgggagatgcacttcgcttttgttatttttttagtagagagggggtttcactggtttagccagaacagtctcgatctcctgacctcgtgatccgcccacctcgggctcccaaagtgctgggattccaggagtgagccaccgcgcccggccgtccactttgcttcttgcagaggctgatggtttgagtaatttccgagattcatagctcgagcgcgccctgttctgtctatgcagtgaagggcagctttttgcatccacggctttttgttggcaaggaggaatgtgcagtggccagatttgtttcttccccttttgttgctgttgttgttgttgtattttattttgtagcatcctaaagtgtcccctccttctatttcttatccttatccaggtagggtttagaaaagctaacttcaggggcaggggagagagagaaagagaggaagagaaaatgagaatgaatgacaatacatgaacccatgggtcaacctttatttcaaggcagcccaaaaggacggctctcccttctctttcactctcttctctgcgtgtgaagctgatgcagcacaggcgagccccaaaattgaggcttagcccgggggggttcttggcttctcctagaaactaattcaagaagccgggcgcagtggctcacgcctgtaatcccagcactttgggaggctgaggcggatggatcacttgaggtaaggagttcgagaccagcctggccaacatggtgaaaccccatctctactaaatatacaaaaattacccgggcatggggacgggtgcctgtaatcccagctattcaggaggctgaggcaggggaaccgcttgaacccgggaggcggaggttgcagtgagcagagatcgtgtcactgcactccagcctgggtgatagagtgaggctgagaatcaaaagaagaaaaaaaaaaaaaaaaaaacaattcaagggcaggccggtggttttagacggcaacttttactgaagcgtcagtgcacagccacagcagagggacacacacctgtatcttttctaagactgggagaattttacaattgcttgaataattgaacagtgcctcgaggatgttacactaggttataaataaattcctgccgtgtttagctgaggcacgaacacaatgcccactgacaattccactttcctcgagggccattctttatgaaaggctgtaggagttccacgacattgttgattcctggattctccaagtctctagaacttgagaactacttttgtgtatttttttaacctttaagtccagagtttctaatgtccgttttatactactataaaatggtactatgtattctttatttatggtactatttacactttattttatacagactctggctccacaaaaaggttaaaaattagccaggtgcagtggtgcacatctgcggccccagctactcaggaggctgaggcagaaggattgcttgagctcggatggtcagggctgcaatgagctatgatcacacatcacatcaatgcactccagcctgggcaacagagtgagaccctgtctctaaaagaatagaagaggctgggcgcggtggctcacgcctgtcatcctaccactttgggagaccaaggcgagtggatcatttgaggccaggtgttcaagaccagcctggtcaacatggcgaaaccccatctcttggcaggcgactgtaatcccagctactcaggaggctgagataggagactcccttgaaccgacgaggcggaggttgcagtgagccaagatcacaccactgcactccagcctgggcaacagagcaagcctcggtctcccaacaaaaaaaaaaaagaaagatacattgaagtaatttaaaaacacttaggaagatgtcatttcttcctatcaaggcgtcctccctttctgttttgttgttatattgggaacgataaaaaaatttttttttcaacccatgtggaccaggttggcctcgaactcgtgccctcgaaccctcgcctaccctgagggtccgagggcccgcgcaaccggccggagccacaatggctccgggtgtcggggctgtcctgtaggccctttgatcttacgcagggtgagggagccaatcaccagaggctcacccctgacgtcacccagtccccagggccagtgagggccctgcgttccatggcgccccctggagggaggaaggggaactgtagctgagagttcagtatctgacaataaggaaaaggcatagtagatcagatggtgcctagtgttctggagagaagaaacaacggggttggcgaattggcagttgcactttataatacaggcctcatgtataaggcagacctcatggggaaggtaacatctgtgcagagaaatggagatgagggctaggagccatgcaaatactggaacatgcttgccagcagaagtcgagaaacatggccggcacagtggcccacacctgtaatcccaggactttgggaggccgaggcaggtagatcacgaggtcagcagttcgagaccagcctggccaacatggtgaaacactgtctctacaaaaatacaaaaattagctgggtgtggtggcacacgcctataatcccagtcacttgggagggtgaggtaggagaatcgcttgaacctgggaggtagaggttgcagtgatgcagtgagctgagaccacgccattgtactctagcctgggcgacagagcgagactccatctcaaaaaaaaaaaaaaaaaaaaaaaagcaaaaacaaacaggtgacattcattttgataaaatagctgatttaacctaatatacctaaaacatcataattttaacataatcaatagaaacatttttgcaagattttatgttatttttttaccatacgacgtcttggaaatcttggtttggaccagccatgttcaactgctcagtagccatgtgtggccagaggcggccgtattggacagtgcagatggtgcatgagggtgttcgggcagtgggaacagccagtacagaggccctgtgggggcacatgcctgctgctacgggaacagtgaggagccccgtgtggctgcagtggagtgagagggagaaggtgggagatgtcaccaacggtctcatcattcattcattaaatccttttttttttttttttttttttttgagactgagtttcgttcttgtttcccaggctggagtgcaatggtgccatctcggctcaccacaacctccacctcttgagttcaagcgattctcctgcctcaccctcccgagtagctgggattacaggcatgcgtcaccatgcccggctaattttgtatttttagtagagctggggtttctctctgttggtcaggctggtctcgaactcccgacctcaggtgatctgcccgccttgacctcccaaagtgctgtgattacaggcttgagccactgctcctggtccattgaatgtgtgtatatatagttgaataaagaagagactggagtttgttctgtatcttctcctttcaaattctgcgccagttgaattttttcctcttccttttatatatttttaattgacaaattgtacatatttatcatgtacatattgttttgaaatatgtatataccgtagaatggctaaatcaagatcattaacatatgtattactttacctattttccttttttcgttgtgtctctgccaggtttcggtatcagaatgactctgacttcatagaatgagttagagagcagttgctcctcctcaattgtgtggaataatttcagtaggattggtgccggcttttctttacacatctggtagaattcgactgtgaatccgtctagtctaaggttttttgtgctggttggtaggtcttgtatgactaactcaattttggaactcatcgttggtttgttcagggtttccatttcttcctggttcaatcttgagaggttttatgtttccaggaatttatctatttcttctagttttctagtttgtgtgcatagaggcatgtggaatagtctcagggtttcttgtatgtctgtgggtcagtggtaatgtcacctctgtcatttctgattgtgtttatttggatcttgtcttttttcctttattaatctagctagtggtctttccatgttatttgtgctttcgaaaatatcaactttgtatgaattaacagcatttgccgtgacctggatgagaccggagactattattctaagtgaagtaactcaggaatggaaagccaaacatcgtatgttctcactgatatgtgggagctaagctatgaggacgcaaaggcgtaacaatgatacaatggactttggggacgtagggggacgagttggcgggggcgagggataacagacaacaaatagggtgtagtgtatactgctcaggtgatgggtgcaccaaaatcacaaatcaccactaaagagcttatgttaccaaataccacctgtaccccataatttatggaagaaataataaataaataatttttttaaaaaatcaactttgggtttcattgatcttttctatgattttttacatctcaatttcattcagctcagctctgattttggtgtttttttttcttctgctagctttggggttgatttgctcttgtttttctaattcctctaggtgtgatgttaggctgttcatttgagatctttctagcttcttgatgtagccacttagcactataaacttcctttgagcactgttctagctgtgtcccagagattctgggatgttgtatgtttgttttcattagtttcaaataatttttttatttctgccttaatttcagtctttacccaaaagtcatttggaagcaggttgtttaatttccatgttgactctaggccgggcatggtggctcatgcctgtaatcccagccacttgggaggctgaggcaggagaatcgcttgactccaggaggcagaggtgtcagtgagccaagatcacgccactgcactccagcccgggcaacagagtgaggctgcgagcccgggcggcagagtgaggctgcgtctcaaaaaaaaaaaaaaaaaaaaaaaattgccccttcttaagtttgcatttagatctcttctcctttgatcacttttaatttatcttcacttctgatatgacattttattttttattcattttctgcctgtttattattgttcctcttttaacttaaaaaaaaaaacatgtctgtactttatgaatttctgtttcaaggtgtttttcccatctccaaatgcttacttgaaaatatttcctttcctcttggttcatttcttctggtgtgtgtgtgcgcacgcccgcgtgcatgtgtgtactcgggtctcattttctgctttcttcctgcagtacctcgtttatgggagatccacttcgcttttgttatttttttagtagagagggggtttcactggtttagccagaacagtctcgatctcctgacctcgtgatccgcccacctcgggctcccaaagtgctgggattccaggagtgagccaccgcgcccggccgtccactttgcttcttgcagaggctgatggtttgagtaatttccgagattcatagctcgagcgcgccctgttctgtctatgcagtgaagggcagctttttgcatccacggctttttgttggcaaggaggaatgtgcagtggccagatttgtttcttccccttttgttgctgttgttgttgttgtattttattttgtagcatcctaaagtgtcccctccttctatttcttatccttatccaggtagggtttagaaaagctaacttcaggggcaggggagagagagaaagagaggaagagaaaatgagaatgaatgacaatacatgaacccatgggtcaacctttatttcaaggcagcccaaaaggacggctctcccttctctttcactctcttctctgcgtgtgaagctgatgcagcacaggcgagccccaaaattgaggcttagcccgggggggttcttggcttctcctagaaactaattcaagaagccgggcgcagtggctcacgcctgtaatcccagcactttgggaggctgaggcggatggatcacttgaggtaaggagttcgagaccagcctggccaacatggtgaaaccccatctctactaaatatacaaaaattacccgggcatggggacgggtgcctgtaatcccagctattcaggaggctgaggcaggggaaccgcttgaacccgggaggcggaggttgcagtgagcagagatcgtgtcactgcactccagcctgggtgatagagtgaggctgagaatcaaaagaagaaaaaaaaaaaaaaaaaacaattcaagggcaggccggtggttttagacggcaacttttactgaagcgtcagtgcacagccacagcagagggacacacacctgtatcttttctaagactgggagaattttacaattgcttgaataattgaacagtgcctcgaggatgttacactaggttataaataaattcctgccgtgtttagctgaggcacgaacacaatgcccactgacaattccactttcctcgagggccattctttatgaaaggctgtaggagttccacgacattgttgattcctggattctccaagtctctagaacttgagaactacttttgtgtatttttttaacctttaagtccagagtttctaatgtccgttttatactactataaaatggtactatgtattctttatttatggtactatttacactttattttatacagactctggctccacaaaaaggttaaaaattagccaggtgcagtggtgcacatctgcggccccagctactcaggaggctgaggcagaaggattgcttgagctcggatggtcagggctgcaatgagctatgatcacacatcacatcaatgcactccagcctgggcaacagagtgagaccctgtctctaaaagaatagaagaggctgggcgcggtggctcacgcctgtcatcctaccactttgggagaccaaggcgagtggatcatttgaggccaggtgttcaagaccagcctggtcaacatggcgaaaccccatctcttggcaggcgactgtaatcccagctactcaggaggctgagataggagactcccttgaaccgacgaggcagaggttgcagtgagccaagatcacaccactgcactccagcctgggcaacagagcaagcctcggtctcccaaaaaaaaaaaaaaaagaaagatacattgaagtaatttaaaaacacttaggaagatgtcatttcttcctatcaaggcgtcctccctttctgttttgttgttatattgggaacgataaaaaaatttttttttcaacccatgtggaccaggttggcctcgaactcgtgccctcgaaccctcgcctaccctgagggtccgagggcccgcgcaaccggccggagccacaatggctccgggtgtcggggctgtcctgtaggccctttgatcttacgcagggtgagggagccaatcaccagaggctcccccctgtcgtcacccagtccccagggccagtgagggccctgcgttccatggcgccccctggagggaggaaggggaactgtagctgagagttcagtatctgacaataaggaaaaggcatagtagatcagatggtgcctagtgttctggagagaagaaacaacggggttggcgaattggcagttgcactttataatacaggcctcatgtataaggcagacctcatggggaaggtaacatctgtgcagagaaatggagatgagggctaggagccatgcaaatactggaacatgcttgccagcagaagtcgagaaacatggccggcacagtggcccacacctgtaatcccagcactttgggaggccgaggcaggcagatcacgaggtcagcagttcgagaccagcctggccaacatggtgaaaccctgtctctactaaaaatacaaaaattagctgggtgtggtggcacactcctgtaatcccagccacttgggagggtgaggtaggagaatggcttgaacctgggaggtagaggttgcagtgatgcagtgagctgagaccacaccattgtactctagcctgggcgacagagcgagactccatctcaaaaaaaaaaaaaaaaaaaagcaaaaacaaacaggtgagattcattttgataaaatagctgatttaacctaatatacctaaaacatcataattttaacataatataaacatttttgcaagattttatgttattttttaccatacgacgtcttggaaatcaagaaacagagcaagcctcggtctcccaaaaaaaaaaaaaagatacattgaagtaatttaaaaacacataggaagatgtcatttcttcctatcaaggcgtcctccctttatgttttgttgttatattgggaacgataaaaaaatttttttttcaacccatgtggaccaggttggccttgaactcgtaccctcgaacccctgcctccctgagggcccgagggcaggcgcatccagccggagccacagtggctccgggtgtcggggctgtcctttcttccctttctccctctcgtctcctgtctcccgtctccctctccccacggtctccctctccctctccctctcctgtctcccgtctcccgtctccctctccacatggtctccctctccctctctttccacggtctccgtctgatgcccagccgaagctgcactgtactgctgccatctcactgcatcctccctgcctgattctcgtgcctcagcctgccgagtgcctgccattgcaggcacacgccgccacacctgactggttttcgtatttttttggtggagacggggtttcgctgtgttggccgggctggtctccagctcctaactgcgagtgatccgccagcctcggcctccccaggtgcggggattgcagatggagtctcgttcactcagtgctcaatggtgcccaggctggagtgcagtggcgtgatctcggctcgctacaacctccacctcccagccgcctgccttggcctcccaaagtgccgagattgcagcctctgcccggccgccaccccgtctgggaagtgaggagcgtctctgcctggccgcccatcgtctgggatgtgaggaatccctctgcctggctgcccagtctggaaagtgaggagcgtctctgcccggccgccatcccatctaggaagtgaggagcgcctctgcccggccgcgaccctgtctgggaggtgaggagcgtctctgcccagccgccccgtctgagaagtgaggagcccctctgcccggcagccgccccgtctgagaagtgaggagcccctccgcccggcagccaccccatctgggaagtgaggagcgtctccgcccggcagccaccccgtccgggagggaggtggggggggggtggtcagccccccgcccggccagccgccccgtccgggagggaggtgggggggtcagccccctgcccgtccagccgccccgtccgggaggtgaggggcgcctctgcctggccgcccctactgggaagtgaggggcccctctgcccggccaccaccccgtctgggaggtgtacccaacagctcattgagaacgggccatgatgacaatggcggttttgtggaatagaaaggggggaaaggtggggaaaagattaagaaatcgcatggttgccgtgtctgtgtagaaagaagtagacatgggagacttttcattttgttctgtactaagaaaaattcttctgccttgggatcctgttgatctgtgaccttacccccaaccgtgtgctctctcaaacatgtgctgtgtccactcagggttaaatggattaagggcggagcaagatgtgctttgttaaacagatgcttgaaggcagcatgctccttaagagtcatcaccactccctaatcgcaagttcccagggacacaaacactgcggaaggccacagggtcctctgcctaggaaaaccagagacctttgttcacttgtttatctgctgaccttccctccactattgtcctatgaccctgccaaatccccctctgcgagaaacacccaagaatgattaaaaaaaaaaaagaaagtgttaatgacagatttgcctccattaaaagccaagaaagtcaaattattcaaattctgtctagggtatatatgaaagatttaaatgtaaaataatgttgtgaatttcaacacatttacttcatttttcagtatttttcaactagtttagcattccaggaaaaataaatttagaaaaaatatataaaaacttgcgcagggcacagtggctcatgcctgtaatcccagcacaggcctttgggaggccaaggtgggtggatcacttgagcctgggagtttaagactagcctgagcaacatggggagagcctgtctctacaaaaataatttaggaattagctaggcatggtagtgtgtgcttgtagtcccagctactcaggaggctgaggcaggaggatcccttgagcccaggagtttgttactgcagtgagctatgatctcaccaccacactccagcctgggcaatggagcaagaacccctctccttaaaaaaaaaaaaagcaagtatatgggggcacatacatttcctttgaaatagcagtctgatgtggcatgagactggcctttttaaaaaatttgatattttgttcatcattgattttttttgcattgattttgatttttaaaaaatgttgcattattattgttattgttattattgtcactctgtcacccaggctggagtgcagagtctccctgagttcaagtgattctcctgcttcagcctcccaagtagctggaactacaggcgtgtgccacctcaccctaattttattttttatttttattttttttgtagagacagggtttcgccatgttggccaggctggtctcaaacttccgacctcaagtgatccacccaccttgggctcccaaagtgctgggattacaggcgtgaaccaccgcgcctggccaatattgcattaaatattcttttatcttgattgctgcatttggggcacacatttacatttggtactgggtgaatacagctccctctggccaggctccagccagccccactcctccagggtgaagtccaccgccacatccttgaaggtcactgattcctgcaagggccagtttcattctgtggagtggcacgtccttctggaacttgggggcagaagtgtcaggggtcaagagcccacaacagccccctgggctggaacattctgattgtgcagaattgggatgcctgaatccaactggcctatgggaacctatctaaggcagaaactcgcccataggcaccttggtagaaagtagaacaaggagccctttcacatgactctttactgccatctgttgggaagtcattgtaatataccaattaatttagtatatgacagtttatcaaactgcctgcaaactgccaccaatgtatgaggtataaggtgggagtcctgcctgggatgaggcacacttgtgcagtgcataacctgcacagctctaagtgacagccctaaaaaatgctttttttttgagatggagtctcgctctatcccccaggctggagtgcagtggcgcaatctcggctcactgcaagctccacctcccgggttcacgccattctcctgcctcagcctcccgagtagctgggaccacaggcgcccgccaccacgcccggctaattttttgtatttttagtagagacggggtttcaacgtattagccaggatggtctcgatctgacctcgtgatccgcctgcctcagcctcccaaagtgctgggattacaggcatgagccaccgcgctcagcctaagaaacacttaaagaaaaatccgtcaagccgttttgtgcaggagatattcgcaagtcccattctatcccagaccccatccctgatcctcacccccattcctgactccagagatgaggctcagggatgaagcaaaaccatccattgcccactttgcctggtaactgaaaggctgcagtgttcgatgaaaaatgtttagactgcgcgacatggtcccagctcagagcattctgcctctgcctcctgcccctgggcactgcccggctcccctctcctcataccccctttcccagtattggaagagtcaggagaccttgagatcatgcacagggatgaagagggcccactggagtccacaaagttatcctggggaagaggaagcccagactcacctggccctcggccatcaaggtcccattggccattgctgggttctgggcatgtgcctctgggagaagggttcacgccagggcccgaagagctggaggaggagaccacagcagaaaaagggtcatttgtgaccctgacagacagatgctttccccaagactcctggtcacggaaggggccatggtcccctaagagtcaaagcaaagtcccaggacaggccacctgaggcccccattccataccagtgacaacagccagcaaccatgaggctgtctcacctccccgacacaacagctctcggacgtgggaacgatggttacccctagatgaggacattgaggcacaagaggtcaagacttgctcaagttcatggagacaaaaagtttcagagaagtctagccacagggccacccctatcttttatatatatatatatatatattgttttttttttttttagatggattctcactcagtgtcccaggctggctggagtgcagtggcgccatctcggctcactgcaacctccgcctcccaggatcaagcaattctcttgcctcagcttcctgaatagctgggattacaagcacctgccaccatgcctggctaatatttacatttttagtagagatggggtttcaccatgttggcaaggctggtctcgaactcctgacctcaggtgatctacccacctcgggctccaaaattgctgggattttaggcctgagccactgtgcctgggccaggggttcttatttatttatataatttattattttttaataatacagacagggtctctctatgttgcccaggctggtcgcgtactcctgggctcaagcaatcctcccacctcggcctcccaaagtgctgggattacaggcatgagccaccacacccagccttggcaaagattcttaaaactttattccataaactgggacttcctgcctggtggggtagacaggctgtataacagcccccagagatatccctggaacctacagatcttatcttatatggaaaagagactttgcggaagggattaagtgaaggatctttagatggggggaattatcctggattatctgggcgggcactaaatgccttcacaagtgtccttataagagggggcagaggagagtctgacacagggcagaagaaggccatgcaccagaagcagagagcagcagaggctgagagagaggacgctacactgctggctttgatgacagaggaaagggctacaagccaaggaaagcaggcccctggaaactggcaacgaggcagcgaaacagatccatccctggagcctctggagggagcatggccgtgctgaccccttgatccctttgaatcccgcttccaacttctggcctccaggattgtaatataataaaattgtgtcattttaagtgtgtggcaatttgttacagcaccatgggaaactaatacagtccacagaatgaaaagatgcagcacctcacacacatttcccaggcgagaagccatacacatccccggctacacagaacacacacacctgaatgctgaaactagtgcatgaggtgttttttttttttgagacagagtctctatctgttgcccaggctggagtgcaatggcgtgatctcggcttactgcaagctccacctcccaggttcacaccattctcctgcctcagcctcctgagtagctgggactacaggaacctgccatcactcctggctaattttttttttttttaggagagacagggtttcaccatgttagccaggatggtctcaatctcctgacctcatgattcacctgcttcagcctcccaaattgctgggattacaggtgtgagccaccacacctggcctagtgcacgaggttttgatgagaaaatgaggaagagagtcttaactttatccccatgaatcacttgttaattacaaaaagaacagggtaacttttttatcttatttaaataattaatttattaatttggagacagggtttcgctcttgttgcccaggctggagtgcagtgactcaatctcagctcactgcaacctccacttcctgggttcacacaattctcctgcctcagcctcccgaatagctgggattacaggtatccaccatgacacctggctaattttttgtatttttagtagagatggggtttcaccatgttggccagactggtctcgaactcctgacctcaggtgatccacccgcctcagcctcccaaagtgctgggattacaggcgtgagccaccacacctggccttattttatttttgagacagagtcttgctctgtcacccaggctggagtgcagtgaggcgatcttggttcactgaaacttccacctcccgggtttcaagtgattctcaggcctcagcttcctgagtagctggggttacaggagcccgccaccacgcccagctgatttttgtattattattattattattattatttgagatggagtctcgctctgccacctaggctggagtgcagtggcgtgatctcggctcactgcaacctccacctcccagcttcaagcgattctcctgcctcagcctcccaagtagctgggattacaggtgtgtgccaccacaccaggctaatttttttgtatttttagtagagatggggtttcaccatgttggccaggctggtctcgaactcctgacctggggttatccgcccccctcggcctcccaaagtgctgggattacaggtgtgagccaccgcgcccagaccagggaaactagagaggagaaacttggcagatgccaccttacccatgtgagtgaggctgatgtggtgtgtggtgggacaagccgagcccagggtccccagtctgatgaggagacagcatcactcctagggcatccctgccaaaagcgtgtgacctaaatctaactatgaagaagcaccagacaaacccaaactgagggacatgcaagtacatggtctgtaatcttcggaacttccaaaagaagactgaaaaccggttccagactgaaggagacccaacaaagcgagcaatgtgtgacctaggatttcctttggccattaaggacattattggagccagctgtaatcccagcactttgggaggctgaggtgggaggatcgcttgagcccaagagtttgagaccagcccgggcaacacagtgagaccccgtttctacaaaaaaaaattaaaaaaattagccgggcatggtggtgtgtgcttgtaatcccgactactcagaagactgaagtgggaggatctcttgagcccaggaggtcgaggctgcatgagctatgattgtgccactgcactccagcctgggtgacagagcaagactctgtctccaaaaaaagaaaaagaaaaagaaagacaaaaagacattattggaagaatcatcaaaaatttgaataaagtctatagattagctattagtattacatcaatattaatttcctcattgtgatcgtggtgctatggttatgtaagaaaatgaccttgtctttggaaaacacagagattcgctagaaggactggggagtgggagggcgcagagaccgagagagggcgacagagacccacagagagggggagagagacgcagagagagggggtacagagacccagcgagagggggacaggacctggggcggcgagggtgaggggaagatcagagagagctgggagacccagagagggaagaacagatgctcaggataaggggagccgagaccgagtctgtgcctgtgcagtgctgctttcgggttctggggtcagaatctgggttgcagctctgccagcctgagagaaatcgcggagtctccccgactctcagtttcttcaactgcaaagtgaggaaaggtaggttccccttcctagggatcgcagcagtcccacgctccgccggactcctggcaaacagcagacgcccaattcctgcgcgccgagtcgtctgagccgcactgatactaggtgggactcagggaatgacaagagggggcggggcgtcacccacagcgccctccccactcccaaccagacccaacttgggcccgcccccggagcttctgctagcctgtctggcccggcctgcacccacctgctccggtcgggtccgcgagttccgtgcgtccaggcggattccgctggacagccaggccttcccttcctccgccgggtcccggaacgcgcctgagcagtccctgtctcggaactgtaagtcccggtaccttaaacgcggcatcgcagctggactacatttcccagaaaccattgaggctcttgctcctcccggcctaagggctctgactgcgagggaatgctgggaaatggagtctgggagcaggatacggggcaggagtaagactgtatttagatacatacacaacagcttttggaggaaaactggtatttgggacatgcctgactgtactggcacgcgaatatccctgttttaggcagaggcgatgccattgtccatttaatccaaatttctcataccatggctgaagtcttcaggacagataaaatttggccctgtgtaaactgatggtgaatgaattgaaccactgttactcaatttccctaggcatctgccttcctatttgcctcagtttcacccaccacttcttaaagggcagtgtgatacaggcaatggagcctgttctgggagctgggagatgtgtgttcaggagtgtaaggatggtttgatattaggacattatgcaatttatcttttgacctttctgaatatatcaatatgcaagcatatctatagatacactaaaaagacttttaataacatccagtaaccctagatgctgagaaagcttacaaaaaaattctgtaaccagtcatttctagataagcttaataaattaagcatatattcatattgaacaacaatagcgacaatgttaaagaattactggcttcttattgtgtttatgtatgtccatataatcaaaacctcatatcaagcttaatcgtaaaacactaaaagaattgccaggctgggtgcagtggttcacacctgaaatcccagcactttgggatttcaaagagggaagctaaagagggaggatcacttgcactcagaagtttgagaccagcctgggcaacatagctagacccccatctctacagaaaatataaaagttagccaagcatagtggtgagcacctgtagacccagctactcggcaggctaaggcaggaggatcagttgagcccaggagggcaaggctgcagtgagctgtgatggtgccagcctgggcaagagagcaagactctgtctcaaaaaaaaaaaaaagtgtaaaccgtatatgtcctcatgagaaaaagctagatggctcattgccagaatgaaataataataggtgttacttattgacaacacgttgtgagctttactagttgactgagctgacaccaccaccctatgaagaaggcattgctctccctattttacagacaaggacactgagatagaggatttatgtcatccccccaagctcccagagctagtcgaggacagaggcaggacttgaatccaggttcagcccatatttgcaaccacttaattttactgctgccaagtttgctcctttttccttgtgttccgataaccaaatgctccaagcacaggttgtactgtcagctgaggctctagagtcagggtggcatggagcagaacctcagctaatctataataggcatgtcacactggagacaaaggtgactccatcttggatggttatccgccatgttgacttctgattaatcccagtcctgggaattccttctgatttctactttacttactgtccctagtgtaagaacatgtcaaccttgatgttatcacacaaattataggctacgacacagcatacagaacattgcctgttctgtaggcttaattgtcttaacccttaattgtcttgctaaagcaagtattgcccttccctatgtgagataagccttaggattagggagtaactgtgtggagatagacctgtcttgctgccacccaagaccatgcttccctttgtaagttccccaaataaatcaccccttaccaatgaactgggtttgtctccctcttttttggtttattgtctccttccacacttgggggttattttgcataaagtccttatatggaacacacgtgaacaaggagtaagtcttcattgctacaagccatgaaggaggttgggggggtgtttgttactgaagcataactacttatcctggctgatacaactgtcttcaaaggttttgaggaagctgaaatttgatattaaatacaagttattatcagagctttgcaagtcattaacctctctgtgcctcagtttcctcattgtacatggggcgataataagtacatggggcaataataagtaccctttttatcaggttatgagatttgaataggtagatagaagtaaagccattagaacagtatgtgacagatagaaaacaccatataagtgtttgctattattaaaaaacgcgttaggccaggcgcggtggctcatgcctataatcccagcactttgggaggccaaggcaggtggatcacttgaggtcaggagttcaaaaccagcctggccaatatggtgaaaccctgtgtctactaaaaatacaaaaaaattagccggacgtggtggctggggcttgtaatctcagctactcgggaggctgaggcaggagaatcacttgacccgggaggcagaggttgtggtgagccaagatagcaccactgcactccagcctgtgagactctgtctcaaaaaataaaaaacgtgttaatagttcccgccggtgacttatattttttccttatttatttattttttgagacggagtctcactctgttgccaggctggagtgcagtggcatgatctcgactcactgcaacctctgcctcccgggttcaagcgattttcctgcctcagcctcccaagtagctgagactacaggcgcccgccaccacacccagctaatttttgtatttttagtagagacggggtttcactgtgttggccaggatggtctcgatctcttgacctcgtgatccgcccgcctcggcctcccaaagtgctgggattacaggcgtgagccactgcacctggccccaactgtgacttgctatttgctcttccttctaccttttccccactactgctttcagaaaacacctacttttcttgcaagaacaagttcttacagcctctcctgcagtaaacgttctccgatttccaccgagctgagccggagctggcaattcgctctgtggggttcccacaggaacatcccagtatcttatagggttatgtgctaaccgctgtgttgtaattctttgtaactgtctgtctctctcgctccagtctcatcacactataatttatgtacgacttaattatctgtttattctgcacttctcccaggaaatttccatgaagttgaggaagtgtctggacctgcagcattaagacgttaaaacaaacaaaccctggccaggcgcggtggctcacgcctgtaatcccagcactttgcgaggctgaggctggcggatcacttgaggtcaggagttcgaaaccagcctggccaacatagtgaaaccccgtctctactaaaaattcaaaaattaagccgggcgcggtggcttacgcccgtaatcccagcactttgggaggccgaggcagacgcatcacaaggtcaggagatcaagaccatcctggctaatacagtgaaaacccgtctctactaaaagtacaaaaaattagctgggcgcggtggtgggcacctgtagtcccagctactcgggaggctgaggcaggagaatggcgtgaacctgggaggcggagcttgcagtgagaccagatagcgtcactgcaagtccggcctgggcaaaagagcaagactccgtctcaaaaaaaaaaaaaaaaaaaaaaaaaattagctgggcatggtggcgcacacctgtaatcccagctacttaggaggctgaggcaggagaatcgcttgaaaccgggaggcagcagtgagctgagatcatggcactgcactccaacctgggtggcagagcaggactctgtctcaaaaaaaaaaaaaaaaaagaaaagaaaaagaaagaaaatgtattcgaatctagtattcaggtgcacagagggtgaagaattgtagttcagatagagaagaaaacctgtaccttccacattgaccactgctcttcctctatttaaccatcctcgagggttgcactgagtcatgtcctttcggatgcatttccttcccagaggataagtggttgtcacttcaaacccttacaatatgctgtccatcctttttgaaggtccaagtcacttctaccttgaattaggataatgggtgtctacagatgagtgggatctggtcccagcctttgaggagcacccagtcaggtagagaaacagagttggacaccaactagggggagggtccccaggaaatggacagagacattgatggatttgtcaccaattttattaaatttattttcctttctccttacccccaaaccaccgtcctactgcagcaggagttttcggttttgtctgtatgtacaagccctggtcagagagaaaaagcctgtagattagaatgagaatttcaagcttttccagatcaagagacccataacttccctccccataactttcctacaatctttggcctgatttggctcatccagtgacgtcatgggcatctgggcagattttcagggttctctgccaaccggagttggtgaggagagaggagagaagagctgggaccaggggtgatggtcaaatgtgggaacagaaagagtccaaaaagacaagaggagacacaggcagaaatggagagagataaggtagagacagggtatagtggaagcaggtatagtgggttacagcgtgtcccccaccccaaagatatatccaagtcccaactcctaggacctgggaatgtgaccttaattggaaacacggtctttgcagatgtaattaagttaaggtgacatgagatttaggatgggccctacatctaaagacaggtgtccttagaagagaaaggagagggagatttgagatggacacacagaaaacaaaaccatgtgaagacagaggaagggattagaagggagctaaggaatgccagcagccaccagcagctaggacacaggcatggggtggattcactctcagaggctctggaaggaaccaactttgccaacctcttgatttcagacttctgctttcagaacccagagaatacatttcttttgctttaagtcacccaatttgtggtgatgttacagcagcaataggaaatgaatacacagggagacagagaaatgaggagagagagttggaagagaggctgagcaagttcacagtgagaggtagcctgcacggagcactccccatgcgctaagtgttattaacagcgttcactggccaggcgcggtgactcatgactgtaatcccagcactttgggaggatgaggcaggtggatcacctgaagtcaggagtttgagaccagcctggccaacatggcgaaaccccgtctctaatgaaaatataacaattagccaggcttggtggtgggcacctgtagtcccagctactcaggaggctgaggcagaagaatcgcttgaacctgagaggcagcggttgcagtgagccaaggtcgcaagatcgcgccattgcactccagcttgggccacagagcgagactccatctcaagaaaaaaaaaaaaaagagcgttcactgattcagttatcaccacccccgccagtgggaggtgatggcattactccctttttgcatatgaagaaactgaggcgttagggaaaggagattaattgggtacttggaggaggcagagagagagagagagaaattgagacggagaggggaagagaggggccggagaaggggctgggggggagggggagggcacaagcataaagaggcagcgagataagcttagagggggagaggaaggtgagggccacttcctccctaggcacagggcctggggtccatggaaatgttttcactgtagtatctttaaaagccagaagaagataaatgaatataacaacagtaattatgatgatgcatagaacataatgaagccaacttggatgatatttgtctttctaccaatgcatccaccaaatataacttttagcgtttttttttttttttttttttttttttttttttaatgtaagaagaggcccacaaaggcaaaagtgctgaggacccgggaaagttgtaatgtggcccagaggtggagaaaaaggaaaatgaggaagaaagacagaaataagatgagagaaaggtacggggcagggggcgggagggagaagagggaggagagagacagagagaaaaagagagacagagactaaagtgactgaagaggagactcccaaagtacacagtgacccatccaggggagtcgccatttttgaggggcccagtgggttccacgggggactgaggagggggcaaggatgactcacgagaccacgatgaccacgaagacaaagacagccagagacacagaaatgaggatgcccaacagcgcctggttcctcgggtatttgctgtccatctggtactgcagggccacgcggggttgccggtcgactggggcgggtggggaaacagccccgacctccacgtcaccacccctccttagccccatacccaccccacctgttcattcagcagcctggggcaggggtgggggtggggcgctctctcttcttctcttcctgcttgttccctgccctctcctggggtctgagtctccatttatccattcctctagtgctctgtctcaggcgccattgtaggcatttgggatatagccgggaaccaaactggcaaactggactcatggagttgacagtccaccccgcatatcacagttatcacagttacagtgaggagctagttctaaaagcatttcatttgatgggatggggtggggtgaggaggacttgggaagtttgactcaaaaccaaaagatacgatacaatggtcaggcatggtgagcttgcgcctataatcccagtactttgggaagctgaggcagggggatcacttcagcccaggagttcaagtcagcatgggctgtgagatcctatctctacaaaaaagaaaaaattagctaggtatggtggcacgagcctgtagtcctagcaactcaggaggctgaggtgggaggattgcttgagcacaggaggttgaggctgccgtgagccgtgactgtgccactgcaccccagcctgggggacggagcaagaccctgtctcagaaaacaaaacaaaacaaaaaccagagacaccatgcacatgagagggaggtgcaaaatgcgaacagtttcacaagatgaaagtcttagttgctgcatcttagctattggccctgaaggtggccttgggagttgctttctgcgtcttccacttgcctcccaccaccaactctttccttccatcagcaaagcctcttggcttgaccttcaaactgtaggcagaatccaatccacttccatggctaccaagcaggtccaaccccagcccactgcttctcttaggaggctcccttgacccctcctcccacagttcctcacatggcctccgggaggcgctgttaaaacctaagtcggctccctctgctcagtgtcttcctgctactccatggccccccatctcagaataaaagctcaagttctcaccatgctcttgcaagccctgcaccatctggttcccacgtgacccggccattgttctagccaccctactattctctttcattcactcggctctggccacactggccttctcctccttgttgcttaatcatgttggatctttgcatgtgctgttccctctgtcattgacactgttcccatcactcacttacttccttcagctttcaaaagtcacctctttagaggtgccctacatccgtattttctaaagtagcagcctcccccaggcactatctaccaaaccattctattttcattagaacaccattgccatctggatcaagcctgtttatttgttcatgcaattaccatctaacccagtggttctcaatctgggataattttgtcactcaagggacatttggaaatgtctggggacatttctgattgtcataatggggagggagatgctactggcatctggtggatcgaagctagggatgttgctaaacatcctacaatgaccaggacagcctccctaacaaagaatgatccagctccaaatctcaacagtgctgaggttgagaaaccctagtctaacctctggccccattaaaatgtgggctccatgagggcaggaactacatctgtctcccattccactgttcctcagtttgggacatcgtagggtgctcaaaatatttgttgtcaccaaataccagccaaaggaagcaaacaggcaaatccaaaagtgggacactctataggacacactcccttctttttcaatgccaatgtcatggagggaaaaaaaaaaacccaaaaactgataagagaaactgttctaggccgggtgcagtgactcatgcctgtaatcccagcactttgggaggctgaggtgggcgaatcatttgagcccaggagttcgagaccagcctggccaacatggcaagaatcagtctaaaaaaacaaaacaaaacaaaacaaaacaaaaactgttctagattttaaaaagaagagaaaaacctaacaattgaatgatataagaagtcctttcattgaacactggtttgaacaaatcaactgtgaaaaatattctggggacaattaaggaagttgacagtgggacctggaattatttgacattgaggaatcattgctaggtttggagggtgtgggaacgacattgtggctacttaggaaaatgtcattatttttagaggtacatgctatgtatggggcatggtgtctgtggtttcttttaagatactatggcaaagaataaagtaggtgaaataaatatggaagaatgttaattgttaacataatttgatagtaagtgctacttttgagattatgatcagagaggcctgtctgaggaagtgacctttgagacccaaatgaagtgaaggagtgattggaacagtgtgacagagagagggaacagcatgtgaaaagatccagcatgactattcaacccggatagatagatgtggattcattatacttttttttttttttttttgagatggagtctcgcattgtcacccaagctggagtgcaatggtgcgatcttggctcactgcagcctccacctcctatattcaagcgattctcctgccccagcctcctgagtagctgggattacaggtgcctgccaccacgctagggtagttttttgtatttttagtagagacggggtttcactatgttggccaggctggtctcaaactcctgaccttgtgatctgcctgcctcggactcccaaagtgctgggattacaggcgtgagccactgcatgttcggtctcgttgtactattctttctgctatgagaatacgttttttaggctgggcatggtggctcacgcctgtaatcccagcactttgggagccgagtggatcacctgaggtcaagagtttgagaccagcctggccaacatggtcaaaccccatctctactaaaaatacaaaacttatcagggtatggtggtgcacacttgtagtcccagctacttgggaggctgaggcaggagaatcacttgaacctgggaggcagaggttgcagtgagccaagatcctgccattgtactccagcctgggcgagaatccatataaaaaaaaaaaaaaaagaatgtatgttttttagatttatgaatgaatgaatgagtgaattcagcacatccttccaaattccccaggtatagcaatggctaagaataaaatctttttctagcacctgccattctggagctaggggcattctaaagttccagggagtctttccatttaacagatggaggaaagtgaatttcagaatacaggagcaacttctgggccacactctaagcaaatggttagggcaggattcgaggctgcatgtgggagcctcgaaacccatatctagtgggtcatggctgtcttcatctcttgcacgcctgtcccatgtcttcccccacccccagaagcttaccaaagcagtactttttgtggatacacttgggagtgatcctctggcaatgtaaacagtccaacacctcttcttttagcaagcctaggcaaggggaaagggagaagtaagacaagggcagatatcagaggaccggcaagggtggaaaggaagaaggagaaagaggagatggggtcccttggcttctcctaaatttcataggtcccactgcccagcagaggaactaagcaaaatgcactgacaattcacataaaaaataattgttatataatcattgaagaactaaattcatccagtagattcagcattctgcttgtggacatttaattaaacatttgttaattctgagtttgcacttttctttttctaatttggagcctcttttgcagacactggtgagatgtctcctctttgggcacactgcctcctcctctactggtgcatacaggagggctacatttcccagggtgcctttcagtaaactgtgaccatgtgacctagtcctggccaatggaaagtgagcaggatcatgtgtgtcccttccaggcttggctatacaactcagtgtgattgctattgcttttccttttgaagcatgcttagaagctgccatgtgtgtatagcctggatccctgagtcaccacctggactgccactcaactgtcaatgaaatttgggtgaaagaaaaataaacctttgttgtgttaaaccaccaagatgtgagggtttatttgttaatacaacatagcctattttattgtgacttacgtaccttcaaaatgttgttttgcagatagtcattattttcataaacctttaaaaagcaaatctccctaggtaccatggctttggggtaagggaactgccaaatggagtaaggagtggtagccaggcttgatttggggagacagggtgaagggggttaggagggtagagaagggagagatagacgatccagaactcacggcaaagtttggggttgcaggctgcaagagaaaattgctgaggtgagttaaattgggatggcaacttgataatttaattggaaagggatcaggagagcaggtaaggggtgaggctgggaaaggagagaagggaagattggggagagatgaagaaggctgagctataggggaggtgaagaaggagtttgggagaaaaagtggtaaaaggggatcaagaggtcaagggagaagaggagaggggattggtggagagatatgctgcaccttttaattcatatgaaattaaaactttcttgaattccttgatcacattcgccctgagggtcaccagctcttccagcagaggctcatctgaggagagaaagagatctctgtggggtgggaggcacccagaaagcccaccccactacctgaagcttccaggagaagagatgaggaagctcctcttcatttataaagggtaaccaagaccaggattactaagggtcccccaggcaaatctatggccagggagatcctgcatctatattctgattcaccgtggggcctaggcaaagccacccttccttggcctcactttcctcatctggcaagtggatttgatctctcttctcctcttcttttttttttctttttgagacggagtctcactctgttgcccaggctggagtgcagtggtgtgatctcggctcactgcaacctcggcctcccaagttcaagcgattctcctgcctcagcctcccaaatagctgggattacgggcacgtgccatcacacctggctaattttttgtatttttagtagagacagggtttcgccatgttggccaggctggtttcaaactcctgacctcaggtgatcctcccacctcggcctcccaaagtgctgggattacagacgtgagccaccgcacccgacctcttcttttttgtgtctacactcactccttcatgatttcaatccatatggctttatatattacctagacgtgcactgtccagtgtggtagccactagccacacatggctactgaacacttgaaataggctagtctgaattgagatgtgctgtaggtataaaatgtacactggattttaaagacattgtgcaaaaaacctgtaaaatatattgataattcctatgtggattgcatgctgaaatggtgatattttatatattgggttaactaaaatatattattaaaattaatttcacctgtttctatttacctttttaaaaatgtgactactagaattttttttttttttttcaaacggagttttgctcttgtcgcccaggctggagtgcaatggcgtgatctttgctcactgcaacctctgcctcctaggttcaagtgattctcctgcctcagcctgagtagctgggattacaggtgcccgccaccacacctggctaatttttgtatttttagtagagacggggttttaccatgttggccaggctagtcttgaattcctgacctcaggcgatccacctgtctcggcatcccaaagtgctgggattacaggcatgagccaccgtgcccggctgctactagaaaatttaaaattgcatatgtgactcctatttgtggctgacattctatttctattggatggtgctgttctatacacagatgccccccacgtttatattactagcccagagggctcactgaaggtgggatttatatacccaactatctggtcaagatatccaattggatgtctaagaggcatctcaaacccactaagtccaaaactgaaccctcgttattctcctccagacctactcccaacctcccagtctactccatcttagtaaatagatgtgtcatgattctaattgctcaattcaaaatccttggtgctttgacgcctttttcttttcctttttctttttttttttttttgagacgtagttttgctcttgttgcccaggctggagtgcaatggcgcaatctcagctcaccgcaacctccgcctcctgggttcaagcaattctcctgcctcagcctcctgagtagctgggattacaggagtgccaccatagctggctaattttgtatttttagtagagacagggtttctccatgttggtcaggctggtcttgaactcccaacctcaggtgacccaccgtcctcagcctcccaaagtgctgggattacaggcgtgagccactgtgcccggctgacgcctttcttttttttatatccctgtgcaattcgtcagcatgactggcaacaaatcctgtttgttcaatattcaaaatacccattccctccccttaactctaagatctcatcttccatagagacaatgtcgccgtctcactccactctggccttcttggatgttctgtgactatgccaaacatagtcccatctcagggattccaccagctgttctttctgcctgcacccttctacccctagaccccctcatggctgcttccctctccccttcaggtcttttctcacatgctcctttttaagggacatcttttttggatgccctactttaagctgcaatccccacccctactcacagcacttgctattccgtggtccctgctttatttttttcctccttagcatctccctccatttgacatattttatcgggcaataaaggattaactgagcaggcctgggttgtcccaatcctgcacatcccccgctcccccccaaaaaaatttggctcttgcctggctcacagaaggtaacctctatttccttggaatatcctgcctgttaagagtatcttggtttggccaggcatggtggcttacgcctataatcccagcactttgggaggcctaggcgggcagatcacttgaggtcagaagtttgagaacagcctggccaacatggtgaaacctcgtctctactaaaaatacaaaaattagccgggcatggtggtgggtgcctgtaatcccagctactcgggaggctgaggcaggaaaatcgcttgaacccggcaggcggaagctccagtgagcagagattgtggcactgcactcgagcctgggtgacagggcgagaccgtctcaaaaaataaaaataaataaataaataaaagagtatcttggtttatgaccaggtgcagtggctcacacctgtaatcccagcactttgggaggctgagacacaaggatttattgaggccagaagtttgagaccagcctgggcaatataatgagacccagtctctacaaaaaattaaaaagtagaaaattagccaggtgtggtggcacatgcctgtggtcccagctacttgggaggctgaggcggcaggatcgctggagccctggaggtcgaggctgcagtgagctgtgatggcgctactgcactccagccggagcgacagtgaggctctgtctcttaaaaaagaaaaaaaaaaggctacattgcatgcgtgtttgctcttatttttatattcaagggaggtggggcagaccggcggaaagaagaggggtgctggagaaggcgttccctcgtctctcctacctttcagagagttacccattaagtgctgcgtttggttcttgacaaaggacgccacaaggtccagttgatttgtctctggggggagaagggagaggacactccagtgagccccccagagagccaagtgacctcaccccctccaggcctggccccgacccctcttgggggcgtggtctccggcatccctcgcccagccccgctgcccaatttctcccaacacgcacccactttccccacaaacacgttcagcgcgtagtcccggaagaaaggcccctccatgcccatcagcacggccccggcgcgcgcctgcagctgctccaactggaagcgactggggatgagggcggagcgcaggtgacccagggcctccagcaccaaggggtcgcactgcaggcagccccagcctccgggggcgcccaagcccgagagcagcagaagggtcaaagccagaggcatggcggggcctttgtgacgtcacagagagaacccggcccgccccgcctcccaggcgagggcgcggtcaggaggcccagggagcatcacggtgttacaggcacgtgttcgctgagcacctgctatgtgccaggcatggttctagaacctagagagaaagtcaagaaaaacagaaagcctctgctcaacccctcttggaacttactaattcctcttaaatttattcattcaacacatattgttttattttatttatttatttattttttcccgagatggagtctcaactctgtcacccaggctggcgtgcagtggtgtgatctcggttaactgcaacctccgcctcccgggttcaagtgattctcctgcctcagcctcccaagtagctgggactacaggcgtgcgccaccacgtccggctaattttttatttttagtagagacggggtttcatcatgttggccaggctggtctcaaactcctgacctcaggtgatctgcccgcctcggcctcccaaagtgctgggattataggtgtgagtcaccacgcccggcccacatattgttttttttttttttttttttttttttttttgagacagagtcttgctctgtcacccaggctggagtgcagtgaggcgatcccgggtcacggcaagctctacctcccaggttcaacctatttttgtgcctcagccaaccgagtagctggggttaccatgccaccacacccagataatttatatatatatatatatatatatatatatatatatatatatagagagagagagagagagagagagagagagagagagagagagagagagagatggagtctcactctgtgtcacaggctggagctcagtggtgcgatctcagctcactgcaatctttgcctcccaggttcaagagattctcctacctcagcctcctgtgtagctgggattacaggcacgcaccaccacacccagctgatttgtgtatttttagtagaaacgggttttcaccctgttgttcaggctggtctggaactcctgacctcaagtaattcacccgcctcagcctcccaaagtgctgggattacaggccactgcgttcaaccttacatgcaacacatatttatttattgaacacctactatgtgccaggtgctgttcaaggcccccagagctagagctgagaaaaacaagaggttcttgtgcttgcagtacttaaattaattaactcaacaaatatttattgagcacctactatgtgccaggctccagagatagactgacataagacgaacacaatctctgctcatagagttcaggctagcagggatgggagggagtggcaggaagagaaacgtaaaacctggtacacagatgagtaactgaaatactgacaaactgcattacctgctgggaagcaaatacacagtgtgatacagttaagagagttccctgaggccaggaggtagggtctggttccctgctgttgtccagcgcctagcgtgtactagttgttcaacagatatttagcaaatcaatgaatccacaagggagggtatactgagggaagggcactttgtttttccctgcaattttcatcttgaaagttttaaaatctggagaacagttgcaaggatgacccaataaacactcagatatgacttcacattttgcattcgctgtatctctctatatatgtagatgaatttaatatcaattaaatcatagaaattcaactaaaagacattataatagtatacacagagatatagcaaatgtcaaaataatatgatatattaatatatagttaaatattaattcagagagattaaattaattaagactaaatattactacgttgagggagagaggaggagagagaggcagagtaggagagggcagttgtcttattaatagtttaggttctacaacaaaactccatagactgggtggcttataaacaacagaatttatttcttccagctctggaggctggaaatccaagagcagagcaccagcaaggtcaggttctggtggagctctcttcttgtatcctcacatggcaaaaagagggtgagaggactctttgggttcccttttttattttttaatttttgagatggggtcttgctcttgtcacccaggctggagtgcagtggcacgatctcagctcactgcaacctccacttcccaggttcaagcgattctcctgcttcagcctcctgagtagctgggactacaggcgtgtgccaccacgcccggctaatttctgaatttttagtagagatggggttttgccatgttggccaggctggtctcaaactcccgacctcaagtgatccgcaacccccctcggcctcaaaaagtgctgggattacaaagtgtgagatcaggccacaaggaggtgctcacacccaagtgaaattctctctgctcccggactgagagtcaggccttgccacccacgcctacctttcttaggatcacccagttgtctacctaatgccgtgctggccataatttgagaaatcaacctgagatattaacgtgtgcgtccttttcctcatcccctattaccatctgcctttcaggcagggagtcaaggggctgttgtttgactgaagaaggggtggccagaatgggatgggaaggccactcattcctcagcttcaagccccaaaccctcaggcctgggtgtgaggcaggaaggcttgggatgcagaaccggttttgtttatcgggttcagccatgctaatttggtaaaacataagttagatgaactatcatcagatttcacaccccagcaaaagtggctgaggaagttcccacactcgctctccaggcgcacagacgtccatcactgtgttgttgacggcactgggaggcaaaggcaagctgggtgtcctcactggggaggtgggtcgcctgtggtacaggaccctgcaagcagctagaagaacagatgagcctgtccacaccatgccatgaatggatccaagtgaaaacagcaaagagcaaaacaaagcaagcaaacaaacaaaaaacccacagtgaaacctacaactcaataccattgacataatttttttttttttttttttttctggagtcaaggttctccctctgtcgctcaagctggagtgcagtggcacgatctcggctcattgcagcctcaacctcctgggctcaagtgatcgtcctgcctcaggctcccacacagaatagaaaaaaaatacccgggtatggtggcatgcgcctgtagtcctagctacttgggagacttaagtgggaggatcgcctaaacctgggaaatcgaggctgaagcgagccatgatctcgcgactgcactccagcctggggcagagagcaagaccctgtttcaagaaataaaaaggaaaagaaaaggatgatatgtttgttcgtttgtttattttgagacagagtttttctctgtcgcccaggctggagtgcagtggcacgatctcgactcactgtaatctctgcctcctgggttcaagcgattctcctgcttcagcctcccgagtagctggcactacaggtgtgcacaaccacaccggctaacttttgtattttttttttttttgagaccgagtctcactctgtcacccaggctgcagtgcaacgacatggtctcagctcactgcaacctctgcctcccgggttcaagcgattctcttgcctcagcgtcctgagtagctgggactacaagcgcgcgccaccacacacagctaatttttgtatttttagtggagatggggtttaactgtgttggccaggctgttcttgaactcctgacctcgtgatccacccaccccggcctcccaaagtgctgggattacaggcgtgagccactgcgccaggccaattcttgtatttttagtagaggcggggtttcaccatgttggccaggctgttctcaaactcctggcttcaagtgatctgccaccttgcctcccaaagtgctgggattacagtcgtgagccaccacgcccagctgaaaaggactatatgttttatgctcatctgagtttgtgactgttcaaagctgtgcctgctgctctcatatttccagagggtttggggggctttgtgaatctcatgaagtaatgtacatacccatgtgtgtattgccagaatgaaggcatgccttatctcatttcgtccacacgaaatttggctgatgtggatgcggaggcagagcagggacagtctactcgtgtgaggtcacgcaggtagagacagagacagatgtggggccaggcaggcagccagaggtccccaggctgcaaagccctgctgagtgacactaatggcctgatgtggcgatggtgtgcagcaggcggaaaagaatgtctgggaaatggttacagggatttggcttcaagcctagcggaggcggggaattagaggaggtggttccagcgtagcggggtggggtgaggggcgttttctcatcatccacttcccatgtccagccccctccctagtacacattgtgtggctacaaaaacggtgacctgttctcatgcacagctgtgggagggcagacagggacagccacgttggaaaaccgtcaggctctatgcaggctggccacgtgcgcatcccttcctccacatgcacacacgggaaatgggtgcacacacccgccaggggcacgcagacacgaatccccttggcagcgtcctttgtaaggaactcaaggtggagacggcccaaatatccgtcaacgggaagactcgctagataaacccactgtggcgtgttcctcggatggaatcccgcacggcagtgggatgatgatctagctgcccgcaaacctctctgggccatcgttcaaacatgatgttgagcaaaagcagaaacaaaggacgacgtgatctgcaattccttttttatttttattttttgacagagtctcgcgctgtcccccaggctggagtgtagtggtgcgatctccgctcactgcaagtgatccgcctcccgggttcaagcgattcttccgcctcagcctccccagtagctgggactacaggcgcccgccaccacgcccggctaattttttgcatttttagtagagacggagtttcactgtgttagccaggatggtctcgatctcctgacctcgtgatctgcttgcctcggcctcccaaagtgctgggattacaggcgtgagccaccgtgcccggccaatctgcaattccgttgatggaaagttcagaacaggcaaaggcacgggatggagccacagctgcacgctcatctgacctgcggtccctgtaaggacagtgatgatgggaaagtgaggagagaggttttctctgcagggacaagggggctccaactgggccaccttctgaggggcctcactgcaacctctgcctcccaggttcaagtgattctcctgcctcagcctcctgagtagctgggactacaggcatgtgccaccacacctggctaatttttgtatttttagtagagacgaggttttaccatgttggccagcatggtctcgatctcttgatctgatgatacgcctgcctcggcctcccaaagtgttgggattacaggcgtgagtcaccacgcctggcctacagcctccttttttaaggctgaataatattccattgtatggatgggccacattgcgtgcattcattcatcagtcgatagatacgtcagttgcttgcacattgtgttctgcattcttttctggatgtgtgttatatttcacacacacaaaaactttaaaataacatgctttgttatttgcatggcctgggattgaatggcaggcaccccaaggcagaggcggggcccgtgacctgccccgtggggcacttctcacctagttcagtgactctcacacccacgggtggggcacggtcacacccacagttcctctcattccatcaccagcactgaggggtgacatgggctctgctcacacactgggcctggaggctgcccctcaggccagagtccccacaccctcccgaggcccaggggttctctgtacactgcctgtctccactgcctgctctctggacaggaaactggggtgtgaggtgaccacaggctgtctgcccccagccaatcctaactgtccctcttgttcctcaaactctatcactcgctcctttttctcttatgcctccctttctgcctctttctctctctctctaggtctctgtctcctccctgggtctctgtctctctctctctctctctctctctctgggtctctgtactcccctgtctctgggtctctgtcccctcccccttctgggtctctgttcctctctctctctctgagtctctgtccccctctctttgggtctctgtaccaactctctctgggtctctgtaccacctctctctgggtctctgccctcacagtctctctgggtctcttttttttcctctctctctctctctgtccctctttctctgggtctctgtccctatctctctgggtgtttgtccccttcctctctgagtctctatcccctttctctgggtctctgtccccccaaccctctgggtctctgtccctctctgtctgggtctctgtccccccctctctctctgggtctctatccctctctctctgagtctctgtccccctctctctggttctctgtccccctctctctctctgggtctctatccctctctctctgagtctctgtccccctctctctggttctctgtccccctctctctgggtctctatcccctgtctcctatctctgcccctctccctgtgtctcagtgctttgtctcctttttcctgtcttgctcctccctccctccctccctctgtctgtccctccctccctcccttcatttcttccttccttccctccctccctctctccctcccttctttccctccctccctcccttctctcctcccttccttcctttcctcttgcctgcctgcctttcagactctgtttgagaaccccatgttctgtgtgacattgggcaggaggcttcctctctttgtccctcagtttcctcactgcaccatggcactcactgggctgacctgaaactgaagggaatcactgtgtgtcctggacacctggtattagtggacgctgaaccaaacccacggcccacatgggttgagagtgtggactctgtgccaggccacatgccaaggcctagcgcctcctttcatcctcacggtgtgctgtaagggaagcaatggcattgtccccatctacagatgaggatgatgaggttgtacaacttgccccaaatcggacagtgagtaggaggcagggcgagaacttgaactcgggctgcccggcctcagagcctgtgctctaaccctacgctgtgagggtttcatattggctgttacgtgtatcggtaatcgggatttcccaacgtcagcgctactgacgtttggggctggatgatccgtccttgtaggccccgacctgtgcacggtataggatgtgggcagcatctctggcctttactcactaaatgccagcagcacccgcactcccagctgtgacaaccatagatgtccgtagataatgccaaaagtcccccacctgtgaatcactgtattcaacacagtgtgcaggatcaagaatacacggtactggccgggcgcgtggctcacgcctgtaatcccagcactttgggaggctgaggcgggcggatcacgaggtcaggagatcgagaccatcctggctaacaaggtgaaactccgtctctactaaaaatacaaaaaaaaaaaaaaaaaaatagccgtgtgtggtggcgggcgcgtgtagtcccagctactcgggaggctgaggcaggagaatggtgtaaacccgggatcgcgccacagtactccagccagggggacagagcaagactccatctcaaaaaaaaacaacaaaaaacaaacaaacaaaaaatacataggccagcgaggactcaaccaaaataaaaaaatctgaagtcctttgggcttcagaaaacaccatccagaaagtgaatggacagcaatataatataaaaatatatttacaaccgggtgctcatgcctgtaatcccagcactttaggaggccgaggtgggtggatcatttgaggtcaggagttcaggaacagcctggccaacatggcaaaaccctgtctctactaaaaatacaaaaattagctgggtgtggtggtgcgtgcctgtcatctcggctacttgggaggctgaggcaggagaattgcttgaacccaggaggcggaggttgcagtgagctgagattgcaccattgcactccagcctgggcgagaaagcaagactctgtctcaaaaaaaagaaaaattaaaaaaaaaaaagaaaatgctctggaattagatagtggtgatagttgtgcaaacatgaatatactaaaacccaccgaattgcacgttaaaatggtgaattttatggcatgtgaattatatttttaaaaaagtttaaaaggtagtttttttttttaaagagtgtgggctgtagtgtcaggatcccagctttgccccttatgaactgtgtgacctgtgcatatccccccgtacctcagcgtccttgtctgtaaaatgaagacaacattagcatctctacaatagtttcgctgtgaggggcaaatgggatgatgaatttaaaatccttgtacacagacatcgttctgtaaatgtgagctgggagcacagaggtatggcctgtgagtcacctgaaaattctgtttggtgagaactcagctcacatcctctctcccactagcccctggccccaacctgcctccagtccacctcccagccaggaaagttttatactgtatgcatgcactactttggaccaaaatctagggcctttctttctttttttttttcttttctttctttctttttctttggagacagtctggctctgtcgcccaggctggagtgcagtggcatgatctcggctcactggaatctctgtctcccaggttcaagcgattctcctgcctcagcctcccaagtagctgggactataggcatgtggcaccatgcccggctaattttctgtatttttagtagaaatggggttttaccacattgaccaggctggtctcgaactcctgacctcaggtgatccacccgccttggccttctaaagtgctgggattacaggtgtgagccactgaggccggcctctagagctttaatttttatttttagagatggggtctcactatgttgcccaggctggtcttgaactcatggcctcaggcgatcctcccacctcggcctcccaaagtgctaggattacaggttcgagccactgtgcctggccagggcttattttatgccacaacactgcataggaaagaaaaatcttaaagattgtaaggcatcatgcaatcatgaaaagctaattattttctgtacctccaagaccaaaggttttaatctcaacctaaaaaaaccccagtcatggaacatgcattaaatatttgacataatgagtgcctagatgtgcttttgagttgtagagctatttggctattaaaagtacattcagcctggtggctcctgcctgtaatcccagccctttgggaggctgaggtgggcagaccttgaatctaggagtttgagacaagcctgggcaacacagggagaccctgtttctaccaaaaaaaaagaaaaagaaaaaaaaaaagctggatgtggtggctcacagctgtgttcccagctacttgggatgctgaggtgggagaatcccttgggcctgggaggtcaaggctgcagtgagccatgatcacaccactgcactccagcctgggtgactgggtgagatcctatctcaaaaagcaagaaaagagaaaaggaaaaaagggaggaaggaaggaaagaaggaaagaaggaaggaagtgagggagggagggagggagggagggagagggagggagggaggggaaataatccagcctcaggggcatttccaaggaaaatgctgtcctggtcacaggacactgctccacccatggctgaggcaattgtccctccctcacagatcttatcagactgcaggatggtatcggtttctctttcccttgaggactcagccctccccacctcagacagcgaccgctctaggccggaaccttatctgagctccctaggcctccagaacccacccgtttctagccacacggtagacatgcctgtttcatgcgcacactcattcatagacacagcacatgcaccacctctatgccaggcacagttctagacacgggggctacaccagtgaccagctcagactcaaacccctggagctatgttctaataaaataagcacatgaaatatatagtatatttcatggtcttcggcactaaggggaaataaataaagcagatagggagggtgggaggaggtggcaggaggtgctgttaatttccagggttctgcagaggagaggagacctcaccaagaaggtgatattcaggtaaagtccggaaggaaatgaggagcaaatcacaaggtcatcccagggaagagccttctgggcagaggaaacagcaaatgcaaaggccctggggtgagaacgtgcctggcctttttttttttttttttttttttctgagacagagtctcactctgtcgcccaggctagagggcaatggtgcaatcttggcttactgcaacctgcgcctcctggattcaggcgattctcctgcctcagcctcccaagtagctggaattacaggcatggccaccatacccgactaatttttgtatttttagtagagacggggttttgccatgttggctaggctggtctcgaactgctgacctcaggtgatccacccaccttggcctcccaaagtgctgggattacaggtggaaggatcgcttaagcccaggagttcaagaccagcctgggccacatagagagatcccatcttcacaaaaaatacaaaaattagccaggggtggtgcatgcctatagtcccacttacttgggaggctgaagtgggaggattgcttgaggctgaaagttcgagtgtagcacctgttctgtgcatacactttgtgtccttctgccacaggacctttgcacatgctgactcttctgcctggaccaccttactctcccattctacctaataacccctactcatctttcaacttaaagctcaatgaggacaccttctaagggaacaccttgggatggtcctgacaaggtcaaattcctctgttagatgttctcagaacactatgcatttttccatggtagccctcagcagggaggggagtttacatttttgggtgtgactgcctgattaatgatggtcttccccacctgaacgtaagctccacgtggacatgaacttgctccctgctgtgtccccagcccctcgaacaatacctggtacacagtaggggctcaataaatatttgtcagatgaatgagtgaatgtatgaatgagaaaaataacaagaatgcaggctaacaactaatgagctcagacaggaagggataaatacaagccacgttgcaaaggaagaatgggtgagagatggatttggagagagaataataatgacctggctggggccggctgtggtggcttacgcctgtaatctcagcactttgggaggccaaggcggtggatcacgaggtcaggagatcgagaccatcctgactaacatggtgaaaccctgtctctaccaaaaacacaaaaaattagccaagcgttgtggcgggcgcatgtagtcccagctacttgggaggctgaggcaggagaatggcgtgaacccgggaggcggagcttgcagtgagccgagatggcgccattgcactccagccggggtgacagagcaagactccatctcaaagaaaaaaaaaaaagactaaactaagctgtgcctgtgtgcaaggaatgtgcatgactggcaagaaatgtgccttgtcagtcccaagatggagcagaactgaaaatggggttattctggctctcctgggctcctgtttccttaatgcttctggtccacggatcacatctcaggagtaaggctccagggctgggtttctcagccggcgctgttgacatttggggccatacaattctttgttgctgggggctgtgctgtgtgttgaaggatgttgagcagcatctttggactccacttttgtttttttttgttgttgttgttgtttttgagacaagagtcttgctctgtcgcccaggctggagtgcagtggcctgatctcagcttactgtaacctccatctcctgggttcaagagattctcatgcttcagcctccccagtagctaggattacaggcatgcaccaccaaacccggctaattttttttgtatttttagtagagacggggtttcaccatgttacccaggctgatctccatctcctgacctcaggtaatccgcccacctcggcctcccagagtgctgggattacaggtgttaaccaacgcatccagtcttggccattttagatgtcaggggacctccccaccagccaggaaaatcaatcaaaactgtctccagacattgcaacgtcccctgagggacactatttctcctgtttgagaatcactgatctgatatgatcatacctatagcagtcagaatgaaatgtgttgtgttgtgttgcaggaataaaccaaccccaaatctcagagacatgaaacagcagagatatgcttcttactcatgctaatgcccatcacagccagctgaggactctacctccacagcttcagagttctgactatcgaacccaggctaacaaatcagccactcgtgggacattgcttccagttactaaggctgagaagccaacgtgcctaaatcctccagtgccaatgaaatgacacgtattcctggtctcatttcattggctcaagcaagtcacatgacaggaagtacaatcttatatgctcagaggagcaaacaacaaaatatctgtgaacggtctattgcaatgtaccaacatttgcatataagtattcacactatctgccggacgcgttggctcacgcctataatcccaacactttgggaggacgaggcaggtggaccatttgaggccaggagtttgaaaccagcttggccaacatggtgaaactccatctcttctaaaaatagaaaaaaaaacttagccgggtgtggtgcagacgcccgtaaccccagctactcgggaggctgaggcaggagaatcgcttgaacttgggagacggaggttgcagtgagccgagatcgtgccattgcagtccagcctgggcgacaagagtgaaactctgtctcaaagaaaaaaaaaaaaaagaattcatattatcttattaaagttattttaccttatttctcctttatcttacggttatttgatttttttttctttttgagacggaatcttgctgtgtcacccaggttggagtgtagtggcatgatctcggctcactgcaacctccggctcccgggttcaagcaattctcctgcctcagcctcccgagtagctgggactacaggcgcctgccaccacgcccagctaatttttttttcttttttttcagtagagatggggtttcacgtgttagccaggatggtctcgatctctgacctcacgatctgcccgcctcggcctcccaaattgctggaattacaggcttgagccactgcgcccagcctatttctcctttatcttaaagttatttgattttttaaagttatgtgtgtaaatagtttagattacccatggactttattccagcagagtacagaggaaaaacaggacatttgtaataaaagggggaccttggcatacccaaccatgatgcacatgtatgttcaccaaaatccacgtactaaaacacggattggctaactacaggggctaaattcagtctacagcccgttcttttatgagccagagctaagaatggtttttgtttttaaagggttgtaggctgggcacggtggctcacgcctctaatcccagcactttgggaggccgaggcaggcggatcacgaggtcaggagttcgagaccagtgcggccaacatgatgaaaccccgtctctactaaaaataggaaaattagcagggcatggtggcgggcacctgtaatcccagctactcgggaggctgaggcagaattgcttgaaaccagaaggcagaggttgcagtgagccgagatcgcgccactgcactccagcctgggcaaaagagcgaaactccgtctcaaaaaaaaaaaaaaaaaaaaaaaaaaagggttgtttaaaaaaaaaaaaaaagaatatgtgacaaagtttttttgtttttgagacggagtcttgctctgtcgcccaggctggagtgcagtggcatgatctcggctcactgcaatctccacctcctgggttcacgccattctcccgcctcagcctccccagcagctgggactacaggcgcccaccaccatgcccggctaatattttgtatttttagtagagacggggtttcaccgtgttagcaatctcctgaccttgtgatccgcctgcctcggcctcccaaagtgctgggattacaggcttgagccaccgtgcccggcctgtgacaaagatcttatatgattccctaagtttaaaatatttcctctctgggccgggcatggtggctcacacctgtaatctcagcactttgggaggccgaggtgggtggatcacctgaggtcaggagttcgagaccagcctggccaacatggtgatacctcgtctctaccaaaaatgcaaaaattagcccagtgtggtggcgcacccctgtaatcccagctactcaggaggctgatgtgggagaattgcttgaatccgggaggtggagggtgcagtgagccgagatcgcgcgactgcactccagactgagtgacagagagagaccccgcctcaaaataaaataaaaaataaaataaaataaaatatttcctctctggctctttgtagagaaagtttcacaactccataaaagactgcccttagaaaccctattgtaataaccccaaactggaaactacacaaacatccatccgtccaccattgaatggataaatagattgtgttatatttgtacaatggaatgccatctagtaggggttgacaaactttttctgttaaggaccagatagtaaatattttcagttttctgggccatgtggtctctgctgcagccattgccaggcttacacagctatagaccacagtgaatgaatgggcgtggctttgttccaataaaactttatttacacaaacaggcaacagtctagagctgactccaggttgtaggtttccagcctgtgccattcagcaatgagagtcaacaatcaacatacaacctatgttaaatggaggaagacagactcaaaggagtacagactgtactgttccatttctataaagttcaagaacaggaagaagtaatctatggtgttagaagtcagaatagtggtgacccttgggagaagaagagggacaagagggcttggggatgttctgattttaaaatctgggtgctggcttcctgggcttgttcactttgtgataatttgttgagctgtacattcacaatgtttgcaccatttttgtgtgcatttattctaaataaagctgggcaagggtgctgcctgtgacagtctgatacctggcacagcagctgcacagcggaaacccccagcttctcaccggaattgggatctgacagcttctcagcctcacagctgttggagcttctcagatccactgatttagtgaatttgacacggcggaaaaattctcaggttcttacaagaaccacgcctcagtgactctcctctttcttaatctcaccactttcaaaccaggaaatgagcagagagaaaaaaaaaacaaaaaccaacaataaacccatttaaatacctctgagacaccaagggaaatgtcctaaacgccaggtaatgaagtccatgttctttactcctgggaaagcgttgctaattcatctccttcatgctgtgactcacgcatctctggtgaagagaggcctccccagaccacctgatctaagggagcagcccctcaccccagcgtttcctggcagtcttctctgctttctgttttgccttcatgagtgtaagaaactgaattttgtctcctcctaaaaaagaattgttgacatcctaacccccaatacctcagaatgtgaccatatttagaaacagggtcattgctgatgtaattagtcaagatgaggtcatcctggagcagagtgaacctctaaaccaatttgactggtgtccttataaaaataatgccatgtgggctgggtgcggtgcctcatgcatgtaatcccacactttaggaggccaaggtgggcagatcacctgaggtcaggagttcgacaccagcctggacaacacggtgaaagcccgtctctactaaaaatacaaaaattagccaggtgtggtggcacacacctgtagtcccatctactcgggaggctgaggctaggacagaggactgggacagattctccctcgtggacttcagcaggaaccagctcaggcaacactgcaaatttctggcctctggaattgtgagacaataaatttctaccatttaagccacacagtttctggtgcttggttacggctaatacagatggataaaattcagatatgggggaaggggaggatgggcattcaaggtgaagggaacagcctgggcaaaggttaggaaccaggacaccactaggcttccacagagaaggatgcgaagtttagtgtcatggggttgtggtgtgcattactataggatgctgcatctcagggacacttgacccatgctcactgtccccttctcagttccagacgtgtgtctctgacagggtctggccaggcaatcgaaaatcaccttaggtctttcaacaggaggtaatttaatagaggggattgatcacacagagcatgaaaggactaaagagttatatgctgcacagggaggcattctagagagtctgtacgtagagtacggctatctgtctatctatctttttaaatttttatttttgagacagagtttcactcttgtcgcccaggctggagtgcagtggcactgtctcagctcactgcaacctccgcctcccgggttcaagcgattctcctgcttcagcctcctgagtagctgggattacaggtgcccaccaccatgcctggctaatttttgtgtttttagtagagacagggttttgacatgttggccaggctggccttgaactcctgaccttaggtgatctccccgccttggcctcccaaagtggtgggattacaggcgtaagccactgtgccagcctatctatctatccgtcggtctgtctgtctatctatctatctaccttttcagagacaaggtctcactctgtcacccaggctggagtgcagtggctcaatcacagttcactgcagcctcaaactcctgggcccaagtgattctcccacttcagcctcctgagtagctggactacaggtgcatgtcactacacctggttaattttaatttttttaaaatagagatgagggtcttgctatgttgcccaggccggtcttgaactcctggcctcaagcaattctcctgcgttggcctcccaaagtgctgggattacaggcacgagccaccgtgcaatctatacaatctggattttaccaagtcctagaggtggtttcagctttgctcaagtttaagcagctccagctttgctgcttaaaatgtggtccatgaagtagcagcatcagcatcacctggagtttatattaaaaatacagaacctccaccccaccctggacctgctgaatcagaattttaagatccctcacaacattaactgcgggagggatgctgtgtccttgatgcatgacatcaagaggtctctgatgtcagcaggtcccacaacgggtgatactaactttgatcccatgcttaagatgctgtctacccagtttctcctctgtaaagttactctttctcacacagagctcatttgatggcttttaccaacgcacatttttagagcatatgaaactgtgagaatccctgatctagagagtattgctcaataaccataggtgtaatgacccatgtttgtaataacagccctgagtcaaggaaagagctgattaattacggcatctgtgggaggtaatttagcttaatgggtaagagttcagacttggaggcaccaaattagggacgcaggtagccaaagcgcagaggtttaaaacttctaccttcactgtacttttgtttcctattctcagtattcagctccttactatgttctctctatccccctgttgccttgttttgttgtattttttttgaaacagggtctctctctgtcacccaggctgcagtgcagtggcgcgatcttggctcactgcaacctctgcctcctgggttcaagtgattctcctgtctcagcctcccaaatagttgggattacgggcatgtgccaccacacctggctaatttttgtagttttgtagtagagatggggtttcactatgttggccaggctggtctcgaactcctgacctcaggtgatccaccctccagggtctttctctgttgcccacgctgcagtgcagtggtgcaatcatagctcactgcagccttgaactcctgggctcatgcgatcctcctgcctcagcctccagagtagttgggactacaggcatgtgctaccatgcccggctaactttttgattctcggtagagacaggagtagaggctggcctcgaactcctgacctcaaatgatccgcccgccttagccacccaaagtgctgggattacaggcatgagccattacgctcagccttgttcagcatttttaaaagcttcactgcctgcccagcgtgatggctcacacctgtaatcccagcactttgggaggccgagtggggcagatcatgaggtcagcgatttgagaccagcctgaccaacatggtgaaaccccgtctctactaaaaatacaaaaaccagccaagtgtggtggcaggcacctgtagtcccagctacttgggaagctgaggcaggagaatcgcttgaacccggggtgggggggcagaggttgcagtgagctgagatcgtgccactgcactctagcctggtgacagagcgagacaccatctaaaaaataaaaataaataaaaataaaataaataaataaataaataaaagcttcaccgcctgacattatgtcaaacattttattgtttacttgttcattgtctcttccatgagaagttgagatccaggaggacagacactctggcttgtctatgggggtattctcagttcacagcacagtgcccagcatacggtaggtgcttaaaaaattgtgttgaatttttaaaaatgtgagcactggaatcagactcacatgagttcaaatcccagctctgccccttacttatctgtctctaagtctgtttctgtgttggtgaaattgagataatggtgctgaaagggttaaagaaatatgatgcatgtgaaggttttgccatatatggcttttgaaaacctttttattttgaaataatttcagacttaacaaaaaagttgcaaaaataatgcaaagaattctcatacaaaataatgcaaagaattctcactcttcacccaagcttctccaaaggttgaaacttttcataaccacagtaaaatattatgaaataaacatggtaacatttctgtggactaatctacgaaccctttccctccctccctccctccctccctcccttccttctttccttccttccttccttccttcctcctccttcccctccttccctccctccttcccttctttctctctctctttctctttctttccctcccctcccttcccctcccctcccctcccttcccttccttccttccttccttctttccttccttccatccttccttccttccttccttccgacagagtctcactgtgttgcccaggctggagtgtggtggcacagtcacagccactgcaggcttgacctcccaggctcaagcaatccttgagccaagacctgggtcacctactgatttctttttgttacaggcgtgtgccaccatgtctggcaattttttttttttaattttgtagagataggggtctctcggctgggcgtggtggctcgtgcctgtaatcccagcactttgggaagccgaggcaggcagatcacctgaggtcaggagttcgagaccagccttgccaacatggtgaaaccctgtctctactaaaaatacaaaaattagccgggcgtggtggcacgtgcctgtaatccctgctactccggaggctgaggcaggagaatcgcttgaacccaggaagcggagtttgctgtgagccaagatcatgccactgcactccagcctgggcgacagaaaaagactccgtctcaaaaatacaaaaattagccgggcgtggtggtgggcgcctgtaatcccagctacttgggaggctgaggcaggagaatcgcttgaacccgggaggtggaggttgcggtgagccgagactgtgccactgcactccagcttgggcaacaagagcaaaacctcgtctcaaaaaaaaaataataataataaataaaaataaagagagaaatgactgattcatataacaacatggatgaatatcaaaagctttacgtggagtgaaagaaacacaaaagatcatctactataggattctatttataaaaagctctagaacagacaaaactaatctgtggtgataaaaagcagaacattagttgcctgggggtgggtggaggtgcgagttggctggggagagtgtcaggtaactttctaggacatggaaatgttctatttttttctagttgggtgtatacgtttgtcaaaactcattgaatggtatacttagcaattgtacatttaactgtctgtaaattttacctaaataaaaggaaccctaaacaaatattgaaattgaattaatgatgtgtgcaatgaagtgtttatggctgaagcctactgacgtctgcagattattctaatgaatggataagctgcagtttctcaactccagcactattgacatttgaggccagagaattatttgttgtgggaggctgtcctgtgcattgtaggatgtggttgacatcctggcctctacccactaaatgccagcagcactcccacacacacaggttgacagtaataaatgtttccagacattgccaatgtccctggggggacaaatttgtccttggtttagaattgcttaaatagagagaaggatgaatggatacatatttatccaatgcagctaatacagcatatatatatatatatatactcatatacatatactcatatatatattcatatatatatactcgtatatatatacaagtatatatatatgagtatatatatatatatatgagtgtgtatatatatatatatatatatatatatatatttttttttttttttgagatggagtctcactctgttacccaggcaggagtgcagtgacacgatcacagcttgttgcatcctcaacctgctggactcaagcgatcctcccgcctcattttttgattttttatagagaggagatctcattctgttggccaggctggtcttgaactcctggcctcaagcgattctcctgcttcggcctcccaaagtgctgagattacaggcgtgagccattgtgcccagcctaatgcagcagaatattaacagctgtagaatctagccagtggctacttggaggttcattgtacactttttccccccaaattttctgtatctttgaaatgttccgtaagtattaggggaaaaatgcatacaccctaagatccagcagtaccacttactagtgactgccctagggaaaaataattggcctgcattcacaaagaggcatgtataaaaagatcctttaaaaaaaattcccttgtctaaaatagcaaaacactgaaacaatgtaaatgcgtatcaactcatcaactgtggaattttttttttttgagacggagtcttgctctgttgcccaggctggagtgcagtggcgtgatctcggctcactgcaagctctgcctcccaagttcacgccattctcctgcctcagcctcctgagtagctgggactacaggtgcctgccaccacacccagttaattttttatatttttagtagagacggggtttcaccatgttagccaggatggtcttgatctcctgacctcgtgatctgcccgcctaggcctccaaaagtgctgggattacaggcgtgagccactgcacctggcccaactgtggaatgtttaaaatgaactatgggccaggcatggtggccaatgcctataatcccagcagtttgggaggtggaggcaagaggattgcttgaggccaggagcttgagaccagcctgtgcaaacagagagactccatctctacaaaaaaaatttaaaaaattagctgggtgtggtggtgcatgcctgtagtcccagctactcaggaggctgaagcagaaggatcgcttgagcccagcagttcaaggttgcagtgagccctgattgcaccattgccctccagcttgagtgacagagtgagattctgtcacacacatacacacacaaaaaaaagaaagaaaagaaaagaaaagaaaaaagatccttaattacatctgcaaagttccttttgccatgtaaagtagcatattcacaggcttcaaggattaggatgcagacatctttgggaagccattattcatcctataacagtgattgtactattttacattcccactatcagtataaaagaattccagttgctccacatcctcaccaacagttggtgttgtcaatcttgtttattttagccattctggtacatttcattatgataaataatatacattaattttacacatttaaaaacattgggctgggtgcagtggctcacgtctgtaattccagcactttgggaggccaaggtggaaggatcacttgagctcaggagtttgagaccagcctgggcaacacagcaagacaccatctctatgtttaaataacaacaaaaataaaaacattattctatattcattattgccacaccgaagaattatacaggctaaatatcctctgactagtgaatgtatagacaaactgtggtatatttgtacaatagagtactactcagcaatgaaaaagcatacactactgatacatgccacaacatgggtgaatctcacatgcatcatgctaaatggaagatgccagactcagaggctatacactctgtgattctatttatataacatcctgcaaaagacacaccacagggaccaaaaacagagcagtgattgtcaggagcaagaaaggagttgactgggccgggtgtggtggctcaagcctgtaatcctagcactttcggaggccgaggcgggtggatcacgaggtcaggagtttgagaccatcctggccaacatggtgaaaccccgtctctactaaaaatacaaaaaaattagccaggcgtggtggcgggcacctgtagtcccagctactcgggaggctgaggcaggagaatggagtaaacctgggaggcggagcttgcagtgagcccagatagcgtcactgcaagtccggcctgggggacagagccaggctccatctcaaaaaaaaaaaaagaaaggagttgactgcaaagaggcacaagggaattttcaagggtgacagatttgttgcgtcttaattttgttggtggttacacaggtgtaagcatttgtcaaaaagcatagaactgaggctgggcacagtgactcaagcctgtaataccaccactttgggaggccaaggtgggaggatcttttgagtccaggagttcgagaccagcctgagcaatatagtgagaaccacccccatctctataaaaattaaaaaaaaaattatctgggtgtggtggtgcaaggctgtggtggtagttacttgggaggctgaggcaggaggattctttgagcccaggagattgaggctgcagtgaactgtgattgcaccattgtactccagcctaggtgacagagtgagactccatctcaaaaaaaaaaaaagttgtacactaaaaagggtgaattttacctcataggtatacacatataaattatatatgtatctatattatgtaaaactgtgtgcaaatatggctgggtatggtggctcatgcctataatcccagcactttgggaggccgaggcgggcagatcacggggtcaggagttcgagaccagcctggctaatatggtgaaatcctgtctctactaaaaatacaaaaattagccgggggtggtggtgcgcacttgtagtcccagctactcgggaggctgaggcagaagaatctcttgaacccaggaggtggaggttatggtgagccgagattgcagcactgcactccagcctgggcgacagactgagactccatctcaaaaaaaaaaattgtgcaaatatacacaaaaattataaatttgtacatatatttaataagcctgactttaaaaagacaattctggaggaagggtctgtaagttttatcggatgccaagggacccaccgcacgtgcacaaagactaagactcctgcgggggttgactgtgcatacctgtgtcacctgccacgatgggaatgaagggagaggaaggaaggacattccaaggaaaggacccttcccaggctcagattcaggacaggggtggcccctgggccaggagcccggagtgcagggagcttgcagaggagtggtagggaggaggaagggggtgggttgaaaccagatggggactcggtttctacctttgtcaccgggctattatcatctacacctctccatatattcgttaatcatacacctgctttatctgccctcccagcctgcattccattcgggcggacagatgtccctgaaggcccgagggacaccagccgctatgccaggctccaaagaacccgaggcaaaccaacgctggtcccggtctttgaggactccccggcccagtgagggagaccgacaggtaagcaggcagtgtccaagcctggggaagaggctgtaaggcagacaccgcaggcactggcagggctccctatggaacaatcagggaagacatcctgaagaagggggcattggggtgaggcctttcccccatgtaatgaggccaagcccaataataataatgatattaataataatggccactggccgggtgcagcggctcacacctgtaatcccagctctttggttttgtcatttgtttgttttgagactgagtcttgctctatcgcccaggctggagggcagtggcacgatctcggctcactgcaaccccgggttcatgtgattctcctgcctcagcctcccgagtagctgggattacaggcacctgccagctctttgggaggctgaggcgggaggattgcctgaggaagggagttcaagaccagactggccaacatggcggaaccacatctctgccaacaatacaaaaattagctgggcgcggtggcgcgtgcttgtagtcacagctactcgggagactgaggcaggagaatcacctgaactggggaggcagaggatgcagtgaggagagagcacaccactgcactccagcctggttggcagagcgagactgtctcaaaaacaaaaagtaaataataataataataatagtagccaccagcatttatcgagggcttgcaatgggccaaaatcactacgctaagcacaggacgtgaactaattaatttaacccttcaacagctgtaaatcttttcccatcctgccttcctgccttgccctccctccctccctccctccctccctccctccctcccttccttccttccttccttccttcctttcttccttccctccttcgagacaggatcttgctccgttgcccagactggaatgtgcagtcgtgcaatcacggctcactgcagcctcaacctcctgggctcaagtgatctgcccacttcaacctcccaaagtgctggggttacaggcgtgagccactgcacctggccagcagatacttttatcactatcccccttcttacagatccaggaacattgaggcacacacttgtttccttccctcaaaatgttcctgctgtggctagggagatggtcatggacacagtgtcagtctggtgaagctgtgctttgacggtagcagcagaaggcattgaaaggaagtgagaggagagagggactgattctggctggggaaggaacggagggttggggatgccgcttgcagaaggcttctgagaagcgattgccctccaggacagatccttttatagggcgtggactttggtgcatagaattccgtcatattttccgttcctgtttctctatcatttgtccatatcccgattttgctttctttcttatttttctctttaatgctccagcctcactcctgttacctcctctggtgccccataaacaaaccctaacacctttaacattcacgcaatcttgggtatgtagaaatgcttacagaccagacagcattgcttcgtgtaattatatcttctaaattgacacaaaggataaatgctatcttttaaattgtgctatagactgttttatttcctactgtttcaattcaacattaatttttttttgttacgttgttttttgttttttaaaacagagctggtgccttagcctcccaagtagctgggatcacaggtgcgcaccaccacgcccagttaattcttatatttttagtggagacggggtttcgccatgttgcccagggtggtctcaaactctcggcctcaagcgatctgcccacctcagcttcccaaagtgctgggattacaggcctgagccaccatgcccggcccagtattatgtttttatgatctctccacgttaccaagtgaaactgatttattgcttccaggacaacatggaggaatccactcccttttgcttaccagctccccacgaaacagacctcatggtgttctctacctccctattcccacccgtaatgctgccctggtcatcctggggtatgtccttgtatgttacctgtgcatgcttctctatggtacctacttggaagtgggatcgctggatcccgggagaaatgcacagtgaatgtcacaaaattctgccccattatctaaggtgggtcttgaagctctagcagcatgtcaccaggcagagaagggcggagaagggaccaaccagttcaaaggactgagagtccacagcatgtccagggttcagtgaattataggtgacccacccgaggggtggaacctttcagggaacagccgtgtaataaacacttgactgcactggtttctttttcattttttttttttcctaaaaaggaaaatagtcttgttgtgggtggcagcttggcaacgtctatgaaaatcttaactgcatatactctttgacctagcaatatcactactcatgcatgaggaagtaggaagaaggaggctcagtgtgttgcggtctgtaaaggtggaacaaggaaaaccaccagcagccccaccaatcggcgaggagtcaaaggaaccatagataggctgcggctattggatactgtgtggtgtagacaagataaaggtgaattaaaacataggagcacaggctgcgcgcggtggctcacgtctgtaatcccaacactttgggaggctgaggcgggtggatcatgaggtcaagagatcgataccatcctggccaatatggtgaaaccctgtctctactaaaaatacaaaaattagccgggtgtggtggtgggcgcctataatcctagctactggggaggctgaggcaggagaatcgcgtgaaccgaggaggtggaggttgcagtgagctgagatcgcgccactgcactccagcctgggcaacagagtgcagctccgtctcaaaaaggaaaaaaaaaaaaaaggcgagccagatttccctatatcaagtatcatcctatatccctgaactcaagagatcataatatttctcagttctgaatctatatatgtaaaccaggagttggcaagctttttctgtaagggctcagattgtaaatattttcagctttgaacatatggtctctgtcacaattgcttaactgcgtccttatagcatgaaagcagccacagccacagacaatactaaaccaacaagcatggctgtgttccaataaaagtttatttataaacccaggcagtaggccagtgtggcctgtgggctgtcatttgctgaccccaatgtaaataaatagtaaatgttagatccggctcagtggctcatgccactgagcactttggggagccaaggcaggacgatcacttgaacccaggagttcaagaccagcctgggcaacatagtgacacctcatctctacaaaacaataaaaaaattagccagacgtggtggtgagtgcctgtggtctcagctactctagaggctgagatgggcagacagcttaagcctggggtggcaagtttaggctgcagtgaactgtgattgcaccactgcactccaggctgagcgacacagtgagaccctgtctcaaaaaaaaatatttgtggaagaaattacaacaaaataccaggggtacatctggaaggcagagtgaaaaggaagggcctggtcaagggaaatattaccctcgtgtttacattttttctactttgtgtaattaaaattgctttaaattaaaaagaaaaaagtgttttaaaaatagctttggtgaccttcttctttctgatcagcatcttagaaatgccagcagcagcagggcctagtgggtcacacctataatctcagcactttgggaggccaagaagggaggatcagtggaggccaggagtttgagaccagcccgggcaacgtaacgagaccctgtctctatttattttattattactattttttattttttgagacagagtcttgctctgtcacccaggctggagtgcagtggcacgatcttgattcattgcaacctccacctcccaggttcaagcgattctcctgcctcagcctcccaagtagctgggattacaggcgcctgccaacacacccagctaatttttgtatttttattagagacaggggtttcaccatgttgaccaggctggtcttgaactcctgacttcaggtgatctgccagccttggcctcccaaagtgctgggattacaggtgtgagccgcagcgcttgggccccatctctatttgaaagaaagaaagaaagacaatgccggcagtacatgaaagcaatgaggaagcaaagttctctagcaccctaccagctagaggagaatttctcagagagtttcttttattcacttagcaggtatttacccggcacttaccatgtgcaaggaactgtcctaggtgctagggatagaacagtaaatgaaaccgagtccctcccctctatagggtggatattctgcagtcagagagacaggcaacaaataacaaacacaacaaataaataaatggtatagcaggtgagaaggtcagaagtgctatggaaaggcagaaacaaggggcaagtaaaggggatggaggtgcctggtgccaggtgaggcattaaacagagtgaccagagaaggcttcattgcgaaggtgacatttaaacaatggcctgaatgaatgaggcgagagctagggggatgtctgggaggaagagtgttccaggcagaggcagcagccgtgcaaaggccctgaggtgggaacgtgtcggttgcatttgaggaacagcaagggagcaagttggctgtagtggcatgagccagggggagagggtgagaggtgaagagaaatgaaggacaaagcaggtcacagcctgcacagccccgtggtccatggtgaggactttggttttactctgggccacggtgaggtgggggcggtgtctgagcagaggagggacaggagctaacttgaggtctaagagggtcctctgactgccctgtgggagcagacgcagtgggaagtggggagaccagagaggaggcacctgcagtggtccagaaaggagatgatggtggatttgaccagagtgaggcagtgggggtggcaagaaggggtcggattctggagctagagctagagattatatagatatagatttttttttgagatgaggtctcactctgtcacccaggctggagtgcagtggcgcgatctcagctcactgcaacctctgcctcctagattcaagtgatcctctcgcctcagcctcccaagtagctgaaactacaggcatacaggcatgcgctaccatacccagctagctttttttttttttttttttgagatggagttttgctcttgtcacgcaggctggagtgtaatggcacaatctcagctcactgcaacctctgtttcccaggttcaagcgattctcctgcctcagcctcctgagtagctgggattacaggcatccactaccacgcctagctaattttcgtgtttttagtagagacagggtttcaccgtgttggccaggatggtctcaatctcctgaccttgtgatccacccgcctcagcctcccaaagtgctgggattacaggcgtgagccaccattcccgaccttttttttttttttttgagttggagttttcgctcttgtcgcccaggctggagtgcaacggcatgatctcagctcactgcaacttccacctcctgggttcaaacgatgctcctgcctcagtctctgagtagctgggattacaggcgtctgccaccacgcccagctaatttttgtattttcagtagagatggggtttcaccaagttggccaggctggtcttgaactcctgggttcaagggatctgcctgcctcagcctcccaaaatgctgggattacatggcatgagccgccacatccgatcagattctggatatattttgaaggtcacattgacatttgctgataaactggatgtagaggtaagaaggaaagaggaatcaaggatggcgctaagtgttttggctcaagtacgatcaagagccatctgccacagatcacctggggactcgtaaaaatgcaagtccctgtccccgcctggatctactcagctggcaactctgggtgggacccaggaaactgctttctgagtaagctgcccaggaaaagactagaaacccagaggcaaccatgatcctcttggggtgggggggggtggtcgtctcagggtagaacattagagtggttgcaagactccccaggttcaaatcctggccctgccattccacctatgtgagctggaatgataccttaaattctcccagccacagtttcttcatctgtaacaagactatcgatggtgcctgcctcacagggctgacttagggcctgaatgagttcatgtgtataaaatatataaaatggtgccaccacatacaacttcccaataagggcagctagaattagcatccagttccaaagatgatgaattcttctttttttttttttttttggacagtcttgctctgttgaggttggagtgcagtggcgcaatctcaactcactgcaacttctgcctcccaggttcaagcaattctcctgcctcagcctctcaagtagctgggattacaggagcctgctaccatgcctggctaaaagatgatgaattctaataataaaatccacaccaaaatattatcaggtgtcagaggtacattttgttggttaagtgaaacagaggatattggtcaagggaaacatttctctatcccttgattttttccatcttgtgtaattaattaaaattgttttaattcaaaaataaaataatgttttaaaaatagctgtagtgggccagtcttggtggctcacacctgtaatgagcactttggttggcaaaggcaggaagatcacttgagctcaggagttcaagaccagcctgagcaacatagggatacccccatctctacaaaaaaatctcaaaaaaaattagctgggcatggtagcacatgcctgtggttccagatactcgggaggttagatgattcaatatgtatatataagtaagcccaagcatcataaaagtattatctattattatttggccaaacatgaggagtcagacgttttctcaaagggggaacttttagttgggttttgaagtatgagtaggagctcaccgggtgacaaaaagtcatacttcctttcattatcttagtcaagacactcccttgaggcatgctgtgttccagatcttgtgctgggagatcccagggacctaacatgagtctgactctgacctacgcggagctactagtcccagggatggatcagacctaagccctgtcctctagtgcctccaagctggtaggagaggcagagagggatacaattcagggtgaccagggcaagcagagagaggaacagagtgagtcatggactccgagcaggtcagcactgagcaaaagctttgaaatggctagtctgacccccctctcccatttactaaagcctggagagggacagggtttgctcaagattacacagaatgaataaatatcctgatcttggagtctggggatttcaaggaccaaacgagatgccagagatgcagacctgccccctcgcagacccttcacccagatgcccaacacaccccaaatccccactcaaatctgcagactaacccctggccccgcagacaatgatgctgtcagagatatctgcctccccagccctcaggctcagagacccacttcatccctcacccacatgcacagcacacatccctgcaagcccttatcatcctatgtgccctgtgctgggtcaggctggacacagacgtgactcagatgcaggttgagccctggaagggctgctagtgtggaaaggtaccaggagacagagcatcccaacccagtgtgaagagtgtgtggaagccgtggcagggcatgggatgggaggagggtgagatgagatgagggaacccttaacacgctttgaaccttgggaagttcacctggagtttcctggcatggggagatggaaagagggagtaacaggcagaaagcacagcatatgtgaagccacaaaagcatgaaacactatttattccttcatccatccatccatttatccattatccatcatccatccatccatccatccatccatccatccatccatccatccatttatccatccatctatccatttatccatccatctgtccatttatccattcaaccgtccatttatccatccatccacccatccatttatccacccatctatccatccatccatttatccatccatccatccatccatccatccatccatccatccatccatccacccatccatttatccatccatccatctgcccatctgtctgtccctctgtccatctgtatgtttatctgttcatgtacttatgcattaatcgattcttccatccatcttatttatttattcattgtgtatatcattcattcattcattcatgtatccatctattcaaatgatcatctgccccctcattcatccatttatttatccactcattggtcacacatgcatccgttcatatagttatcagcatcagctgtcatatgatccttccccagcaacacctcctcagagagcctttccgaaccctttctaaaataatacccagccaccttgcctctattaccctcctttttattttcatcacagccctgaacgagacttgccattttgccctgtaattgtatgtttacttgttcggtgtctgtggctaccatgagaacatgatcatttattcaatgagtgtttctctctttttaaaatttaacttttaggggtacctgtgcaggtttgttattaggtaaattgtgtgtcacaggggtttggtgtatggattatttcatcaccccagtaataagcatggtagcccagacaaatatttcttgagcatcactgtgtgccaggctctgttgtagacactggggataacagagacaaaatccccttctgcatgaagctgacattctagtggtgatgtcagacaataaacataaacataaataaacataaaggtagtaaataaattataaggcatgttggaaggagggtgctgcggcaaaagaaagcatagagccaaatgagggtgtcaggggtccagggggatgggtgctcaaggaagacctcaccaaggaggtgatagctgaacaaacgctgtgggggagagaaggagcccaagcggttatccaggggaagagcattgcagttagagaatggcacatgcaaaggccctgaggcaggactgagcctggtgtgttttggggacattaagaaagccattgtggctggaatggaatgaggaaggaggagagagcaagaggtgggggcagagagggcagagaggggacagaggggaccagatggagcagggccatgtgggggaagactctgttttcactctgagtatgaccagagccagaggaggattctgagccaggaagaaacaggatccaactgcctgcaggatgtggttccctctgcctgccatatagggagtagattaatacctgagttttgtgagagccaggatcatgtctttgcacctgtcgcctcctctgtgtctgggtgaagtctgggtggggcacagtggctcacatctgtaatcccaacggttttggaggccaaagtgggagggtcgcttaggcccagaagttccagaccagcctggacaacacagcgagaccctgtctctacaaaatcttaaaaaaaaaaattagccagggccaggcacggtgactcacgcctgtaatcccagcactttgggaggccgggttgggtggatcacggggtcaggagttcaagaccagcctggccaacatggtgaaaccccttctctactaaaaatacaaaaaaaaaaaaaaaaagctgggcgtggtggagcgcatctgtaatcccagctactcggagggctgaggcaggagaatcgcttgtaccgggaggcagaggttgcagtgagccaagatcacaccactgcactccagcctgggggacagagcaacactctgtctcaaaaaaaaaaaaaaaaaaaaattagctgggcatggtggcaagtgcctgtagtcccagctactcaggaggcttagttggaaggatcgctcgagcccaggaggttgaggccgcagtgagccatgattgtgccactgcactctggcctgggtgacagagtgagaccccatctcaaaacaaacaaacaaaaacaacaacaacaacaaaaacaaacgaaataacaataaacaggagtctgcaaactacagactatagcccactggccaaattcctcctgtctgcataaataaagttttattggaacactacctcacctattcatttgcatattgtctctggctgcttttatactgcaaggacagtgtggcacaattggagccaaggcttctgtcccgcaaagctgaaactatctactgtctggccttttacatgaagaagtttgctgacccctggtctagaacaattcttggcacacagtaggcactcaaaaaataattgttgcagaactgaacctgtcactcatctgtgacccacacggggttgctagcttgctcttgtctcagagccagttccagctccgagtcacatgcaggaaaacaacagcccagcgaccaaaaataaaatactggaaccattccagtctttgctgcagagaaaatgcccaggcaggattgcagtcaggacccatggcaaaacttagcaccctcttcctccttttgctctagtaagactcaggcccctttccctccatcaggcatggaaactgctccctaattttttttgctcaaaatttccccccaaactctcttccacaaagctgccctgtccttggttctcccgtctcttcccctttcagctccaactttttatcttctttttctttttttctcaccctgtcttttggtgctgacagctttttgttttcatcagcttagttccttgctggctttccccacacctgtgctgctccttactcagattctgcataacgaggtcacgtctgggggctgtgccagctggtgggaatccagcttccctggaggctcagaatgcccccatattcccctttccttttccccggcacacacccgtcgtggtattccatcccccttcactgtctgggttccctctctgctgcagctgatacccacaggacccacagaggggtcagccctggacagccaaggactcacaatttaatgtgaatgatcccagtgcctggagttcagagagggatggctgacggggtggccttgatccctgagataatgagtttggggctttatcctgaggaccttctctggcaggcctggatggaggacagatggagaacttagaggcagtggagtgcctcctttggacttgattttctgggtctcagcctccctctgctggctttgtgcagcccaagctctacagccagactacattgattcgaattcaggctctgccacctttaaactgtgcagactacattgatttgaatgcaggctctgccacctttaaactgtgcaaccttggtcagctgtgcctcagtgtcctcatctgtaaaatgggtttgacattagaacttaccacttagcgttatcaggaggattataggatttagcacacagaaggggcttagaactgtgcctggaacacagtaagcactcaataaataccagcaactttcaaaatgctgatacagccgtccaccacatagaatgccctccgcaaaagaaagctcattactatcactcagtgatgtcatcaattacctcatagactgagcagaattgatgacatctccaattatgaggtcaatttagaacctggtgggcatgatgatatcacaagttgccaggtaaatctacctgggtaatcccaggctaaatctagccctgggtagtgttgatgacatcaccagttaccaggcagattatagttaaaatgtgggtgcccagtgccttctttcctgtttgaaattctgttgtgtcccagtccatactctttcctagcaccgttgggaacaggactttcatgtctctggacctcaatttttctttctttctctttctttctttctttcttctctctcttttttttttttttttttttgagttttttgtgatagagtctcagtctgtcacccaggctggagtgcaatggcacaatcttggctcactgcaaactccacctcccgagctcaagcaattctcctgcctcagcctcccaagtagctgggactacaggcgcccactgtcatgcctggcttatttttgtatttttagtagagatagggtttcaccatgttgggtaggctggtctcaaactcctggcctcaggtgatcctcccacctcagccccaaaaattgctgggattacaggggtgagccactgtgcctggcgtggacctcagttttctatccatcaaatggggataataaaagcaccagcctcgtagggttgtggagagaatccaatgagttaatacataaaagggcaaaatgtccagcacacagtcagcactccatacacagcagcactcattatctttactgtaggatgtttccatggagcacgctccagccagagtgacaggagccctcagctctgtcttggttaagacagatgcctgcaggggcctgtttcctaggagttggagcccagatccgccattagcagtagtcaggagaccctggacatgttgctagcctataaagtggggtaatgaccatgccagcctcacggggctggcatgaggatgcactgacataatgacagtcatgtttccagcacacaatcagacctcacaactgtgagctgtgttatcactgcgagtactctcagaaaggtccttttctccccaggatgttgtttccccatctgcaaagaagtggaaggtggctgtggcaatctcaaagccatggcaatcttgacactatgaccacagggatggtcctgtgattcacctttgctgttgctgagcaagtgcattgggagttggatgcttgaatctgtgtctgccctcagcacccaactccagcttctcttgtctcttttctgcccatctcttatctcccaacatttcctttcatatttctttggcttcttgctcgtacgctagacttcgtatgtatatagtttctctcctgcatgctgtttgtaggacaataaatggcaatagtcatgataatcagtattttctttttcttttctttcttttttttttgagatggaatcactctgccacccaggctggagtgcagtggtgctatctccgctcactgcaacctccgcctcctgggttccagtgattctcctgcctcagcctcccgaaaagctgggattacaggcgtgggccactatgcctggataatttttgtatttttagtagagacggggtttcaccatgttggccaggctgctctcgaactcctgacttcaagtgatctgcctgcctcagcttcccaaagtgctggaattagaggcgtgagccaccgctcctggccagtactttcttattcagccttttccctggtgccaggactgtactaagagctttgtaggcactaattcacttaatccactcaatacaagcactcattaccatttactcaacaaacacttattaaacacctactgtgtgccaggcactgaggattcggcactgaacaaaataaagatctttgtcctcgtgggacttaaattctagtgaggagacagatgataaacagataaattagcaaacactcccagtgctatgagaaaaagcaaagcggggttaaacgagagagagtgatgagaggaactgtcttatataggatggccaggaaaggcctcttggaagaggtgatattggagcagaacggatgatgtgggagagaggttgtcatgcaaaacctggggaagagcattcctggtggacccaacagagaatgcaaaggccttggggcagcaccaggcctcctggtttgagaaattgagccagtgtagctggagcagtatgaaggggagggcctgggggtgagatcagagagagcaaaagggccagccacatcccgcaggacctcattggccatggtgagttcttagacttttactgagtgaaatgggagccatggaaggctctgaacagaggaaaggccccatctgaatagagtagactgtagggagagcaagggtgaaggcagacagtccatcactcccattttacgagtgcagaaataaatggaatctcaaaaaagtccagcaactggcctgagcccacacagctgctgagcagccgagccaagctggcaggcctccttgggttcagtggagccattcctttgtgcccttggctctttttattttccttttaaatagagatggggcctatgttgcccaggctggtcttgacctcctgggctcaagtgatcctcccaccctggcctcccaaagtgttgggattacaggtgtgagccacggcacccttccaaccttgggaagtcttttggctctcctgagcctcagttttcccatctgtaaattgtaaatggggaatcattaccacgtttgggcatagcatggcggttaaaagcacaacttctggttggatctgagtccttgctctgccatcggccagctctgtgactttctgcaattaacaccctctttctaagcttggggttacctcatctagaagatgaagatcttaatagcaccaatttcaagggcttcgttgtaaggattaaatgagatcatgcaggtaaggcgcttagcacagctcccggtctacatcgaagtgcttgataaacgatcattgttattccgatagtatcacggcccacacctccccggtgggtgagagcctgggagggtgcctggtacatggtctacgttcgacaaaagtgaattctgtctcctgtctctcctgcccgccgggtcccgggggacccaggcattccggccttcggtcggcccccccacgccggcccttacaaaggcccccattcatgccttgcgcacaaagcggcccattcaccctggccccttgggcctcccgcccccggccgccccccgcgcctcgctattggtggcgccccgtgcccatcaggcctcggcttccacccccgaccgcgccgcctagctccgcgcccgggccgcgttcttttcccacggctggcacccttcgacaacttctgattggcccagcccgccagccgctctttttgattggcggctcccgtcccccaggggcggggccgtagcttgccgcagcgggcgccgattggcctctgctgctctcttgggggcggggctgtcctggcggacacgcccctctttctccccaggccgaagcctcgggacggccctggaagccggtgagtgcccggggccggcagccctccgggggcggcggaacgggactgagccaggggaagctggagcctgggggctgcgatcggggcccgggagcccgggcaggcggccggggacggcggggaggtgacgcggacactcaccttgggcgcgcagcgggacggcggcgagggaggtgggggggcgggacgtctacactcccccaactccagttgccgccgtgtgcgaggcccggtcggggtcctcgttgtcagccccgggcctgttccgcagaaggggaaactgaggctgtctttggaacctcggccgctttaatacctgagtcatcgcctccagtcccccgcccccagcatgacatgtctctgttctcacgtgtcagaatcggaggccagagagaggggtcgtgactggaagaggcggaggggtagggaaggacatatttgagaacctatgatgtacttggacgcttttattttttataactaaataatttcctttccttatcgtgttgactcgaggtgagttatattgtacccattatacagagaggggaaggctgagactgggccgaattggtgactgcagggggacctggtggagaagaacactccagagaccaactgtgtgctgggtcctttaaccttttcagtcccacaggagtcccctaaggaaagcggtggtccctgtggcatagatggggaagcaggttggtagtaatcaccaactgggacgcagaaattcatgtctttagggacctgctacaagttctttccagaccccctcctttagaatggcagaaaacggtataggcttgaattccagacctccctcttacgctgtgtgatcttgagtgccttactttgacccttcctgcctcagtttccacatcagagaaatggacatgctgatcacccctatgtcattggttgttgaggttattctaggccgggcgcagtggctcaggcctgtaatcccagcactttgggaggtggaagcgaaagaatcgcttgagcccaggagttcgagaccagcttgggcaacacagcgagacttcgtctctacaaaaagtaaaagagttagccgggcgtggtggcgtgaccctgctgtcccagctactcgggaggctgagcagggaggatcggttgagcccaggaggtcaaggctgcagtgagccatgatcgtggcattgcactccaagctgggcaacagagagagaccctgtctctccctctttttttttttttaaatcattttatgatctcaaagagctgttctaagaggagaaaatacccgacacatagtaggtactcttatcaccatgtagtctttatttcactcccgagactgaagctcaggacagaataccattgtcctcttctttggtactcttactgtctatagattttgttgttcccttcccgcagttgggaaactgaggctcagggagattaatgatgaagcactgggctggggaactttctgaacgtcgttttattaatttcactggccgcaatgcacagcagggaaagctgaggcccaggaagctccagcggggtttgaatcccgggaatcctcagccttctccgcggcgggccctcgacctttgccctccataagggggaggagcccctggcgccgccgccgccgccgcccacctggcaacaggctcaacccccgccttcccccggcccccgtcagaggccctgaagctccaggcccgccccgttcccagccgggcaggtgctgggtgacatcagagccgggctcccgccctgtgacgcgacggggccccgccctgcgctggaccgcggaggtcgctgcacctgaagagaacggggattcccgcgccctcaccccatctccccgctccggtcggcgcccccaggtagccccgaggatctgcgagttgagggggcggcgacacaggcgcttgggtccaggggaatgggtacggggctctcagactcctggatctgagaaggggccttgggggccggctgtcccaggtctgaggaaggactgcgccgcgagcccgaacttctgggtcctgggggaggaaaggactggggccaggactgcagagctggggtcttaggggaggagggggctgcaagcccggattctggggtctgtaggagcaggggctgggggcctgaactcctgggtctgagacaggagggcattgagtactgggactccggaaacccagcgctagaagccagggtcagacggctggatgccaagggccccaacctctgccccagggcggatccctggctgcttttctttttcaagcccagcagtctcggcccctcccagggcaggtgctttcacctgcccaggtgacagtaattagccctggcagagtgttcctgctggttgaggaagggtagggcagtcagagaggctcggccacttggagccaaggcctgcaggccctgcccgccccatcagggctgtgatccatcttcagaactcagcatcctcacctctagcccggctgcagtgaggtgagggggcctgcacttcccaatccataggaggagggggctgggggctcagactcctgggtcctgggagaggaggaggctgggagctcggactcctcagcctggggaaggaaagggctgggggcttggactcttggctccagggaggagaggcatagggcatagggtgattgcaaaaactccgaaacccttcctggtcaaaggccacagggctggtgaggaagtggatggggtggggtggggtgggtgggggtgagggtaaagtcccagggatggagtttgggtccggtgtatccaggtcacactggagatatggggtgagccttgacgatttgggggccacggggtggagaaactccctgctgccttcagagtgcaagggtccagcgtttgaggcctgagagcctcagggccaagagtcactggaagctggagctgctgggcttggggatgggaggagagggtctgggaggaagtgggtcctctcagcggagctgggattcccgtgggagaggcttgagggaaaggcaggagtctgttgggaccagatccaggggggcctccagggcagctgggcgtttagaaggacttctccaggggtatgtgggagcgaggtggggacggcagttgcatataggtctatcgggcagaggtgaagtcctgctgttggggagacagaaatctcccactgtttctgtgactgatgtggtggggcagtgatggggacatttgaggcagtggatgagagtaggggccgggcgtagtggctcatgtctgtaatcccagcactgtggaggccaaagcaggaggatcacttgagcccaggagtttgagatcagcctgggtaacatagggagaccctgtttctaccagaaaaaaaaaaaaaaaaaaaaaaaaaggctgggcctgatggtgcgcacctgtggtcccagctactgaggaggctgaagtgagaggatcacttgaacacaggagttgaggctgcagtgagctgtgattgtgccactgcactccaactccagcctgggcaatagagcgagacctatctctaagaaaaaagagagagagagagagagaaagagagagagagacagagagagagagagagagagagagagagagagagagagagagactaggggcagacttctttagcaggagggggccacgcagcaggatagggagaatatttttcctgcctggtgcttggaccgcgttggaattgccactactgcccatggcccgctggatggtgggaggggcctaacacattctagttcccccagcacctggttgcctccgagatagctggagctggatccacccctaggccaggagctcctccaggcagggctcccagcctactcttctctgggtcctcaggcccactcggggcggagtctcgtacttgaaagtcctcagagagttgaatgaatgggtccagtctccccattttatggagaaggagtcaggttccagagaaggaaggaattgttcactgaagcagtgagattcgagtctattctgcaggcatgagataggcgtgaccagaggtggtcagggaacctgaatgacaaaaatcaggtcaattcccaccctgggctcatatcttagagtaaaagcaaggttgtaccttttgtcccctctcttacatcccctcccaccctctgcccctcgatcatttggctctagccatgctgcctacctcacagtgacacagccacacagatgcattgtggccccaggacctttgcactgctgtctggaatgatttttctcccaacaacccccttcctcgctcctgtcatctcccttgggtcttcatttaaatgccacaccagagaggccctccctggccaccctaatgaaaacttcaacatcctcaaccctaacatttcctgtcccctggtttattcctccccttggtatttatcaccatttaatgtactatctggccgggcatggtggctcgtgcctgtaatcccagcactttgggaggcccaggcgggcggatcacctgaggttaggagtttgagaccagcctggccaacatggtgaaaccccatctctactaaaaatacaaaaattagccaggcatagaggcatgcgcctgtaatcccagctacttgggaggctgaggcaggagaatctcttgaaaccgggaggcagaggttgcagtgagccaagatcaagccactgcactccagcctgggtgacagagcaagactctgtctcaaaaaacaaaaacaaacaaacaaacaaacaaacaaacaaacaaaaaaacccaacaaacccaccaaacataccatatttggtttctgtaaaaaaataaaaaagagagagagaatttttaaaaaacaaaaaccatactatctaatttacatttttaatctttttatctgtctcctgggattacagcagctctgtcaaatagcaatataatacaggccagatgtgtaatgtaacattttctagtagccacatttaatgataaaagtaaaaaaggaacgggtaacattaatttaatgatatattttatttaacccagtagattgaaaatattatcatttcagcatgtcatcaaatatttaaaatctcagcaaactatctttttgttgtactaagtcttggaaatctggtgtgtatcttacacttagaactccagatggggatatttatatttaaattttaagatggggctcggtggctcacacctgtaatcccagtactttggggagccaaggcaggaggatcgcttgagcccaggagtttgagaccagtctgggcaacatagaagaccctgtctctacaaaacaaatttaaaaattagtaggcatggtggcatgcctgttaatacatttattttttaattaataaatttcagacatgaatcacctgaggctgggaagtcaaggatgtggtgagccgtggttgtaccactgcactccagcctgagcaacggagtgaaacctcatctcaaaataaaataaaatagattgaatttaaatgaatgaaattgaaaatgtgtttcctcagtgacacatgccacattgcaagtacccggtagtgcacaggtggtggtggcttctgcagtggacagcccggggctagaaagtaaacttttggaggcaggcgtcttcttccagcttgtctgttgctccattgtcagtgcccagaactgagcctggccaggagtggtggctcacgcctgcaatcccagcactttgggaggctgaagagggtggatcacctgaggtcaggagttcaagacctgcctggacaacatagtgagaccctaatttctacaaaaattgaaaataattggccaggcgcggtggctcacacctgtaatcccagcactttgggaggccgaggcgggcagatcaccaggtcaggggatcgagaccaacctggataacacagtgaaacgctgtctctactaaaaatagaaaacaatagccgggtatggtggcaggcgcctgtagtcccagctactcaggaggctgaggcaggagaatggcgtgaacccaggaggcggagcttgcagtgagccgagatcgtgccactgcactccagcctgggcgacacagtgagactccatctcaaaaaaaaaaaaaaaagaaaataattagccggggccgggtgtggtagctcatgcctataatcccagcactttgggaggccgaggcaggcagatcacctgaggtcaggagttcgagaccagcctggccaacatggtgaaaccctgtctctactaaaaatacaaaaattagctgggcgtggtggcagacgcctgtaatcccagctacttgggaggctgaggcaggagaatcacttgaaccctggatgccgaggttgcagtgagctgagatcacgccattgcactccagcctgggcaacaagcgagactccgtctcaaaaaaaaaaaaaaaaaaaaaaaaaaaaaaaagaactgaccctctgagcctggttcacagcctagcttattaaagaatgaatgagtgcctagagaggtgaatgaatgaaatgagtaagctgggtctgttaacccactttgcagaagtatggcaagaggtctggtaaaggaaggcagaggtggctgcctggggaatttggggtagggaagggaggcccgggggacggagccccatctgacccccaccctctttctttgcccctgcagaccatggcagccgtgaccatgtcggtgcccgggcggaaggcgccccccaggccgggcccagtgcccgaggcggcccagccgttcctgttcacgccccgcgggcccagcgcgggtggcgggcctggctcgggcacctccccgcaggtggagtggacggcccggcgtctcgtgtgggtgccttcggagcttcacgggttcgaggcggcggcgctgcgggacgaaggcgaggaggaggcggaggtggagctggcggagagcgggaggcggctgcgactgccgcgggaccagatccagcgcatgaacccgcccaagttcagcaaggccgaggacatggccgagctgacctgcctcaacgaggcctcggtcctgcacaacctccgggagcggtactactccggcctcatctacgtgagtgggctcctgctggggggcgcgtgcggcggagttgctgccggttggggaaccaggtccaccacccggctcccctgcattaacttgaggctgtttatcatctgtatcccatgtcccgtgactgttcctacacttacatggttgccaaattatgaattgttggattactaggacagcctcggaacctactggggacattgcatgatacatatggtagataaactgtattattttcctaaagtataaaacgttccaatttctcagatatagctcatcccgagttttaaggaacggaaacagatgtgtgacaatcattaatgtgaatcactgagtatagaaatgtgttgcttgaggttcaagaccagcctgggcaacaaaacgagaccctatctcttaaaaaaagataaattagccaggtgtggtggtggcccgtgcctttagtctcaccttctaggaagactgaggcaggaggatcacttgagcccgggaggtcaaggctgcagtgagctatgatgataccactgcactccagcctgggtgacagcacaagaccctgtctcaaaaaaagacaaaaagcaaaaaccttatgctaggctctgtgctaaatgcctatctattaattcattcaatctcaccataggaaagatagagtctattattattaccattttacctaagaggcaaatgaggcccagagagagttaataacaataaaaatgaacatttattaaacatttaccaaccattcttccaagctttctaaaatacattgcctctgtacattttcagaattataaagcatctgatcctcattttacaggtaagaaaactgaggcacagagagttcaaggtcacacaattagacctgacagagccaggtagtctgtcttctcactttgctgtggtgcctcttaagattgagatggggctgggaatggtggttcatgcctgtaatctcagtactttgagaggctgaggtgggtggattgcttgagcccaggagttcgggaccatcctgggcatggcaaaaccccatccctgcaaaaaaaaaaaaaatacaataaattagctgggcatggtggcacactcttgtagtcccagttacttgggaggctgaggtgggagaatcacctgagccctgaaggtggaggctgcagtgagctgtgatggcgctactgtactccagcctgggtaacaaatcaagaccctgtctcaaacaaaacgaaacaatacaaaaacccattgagaagagattgatgatacttaggttgactatggtagtcttcccacgtctgtgctaagcattggaggttcgttgcatttttaaaactctttacagcaaacggatggggtagagcagtggttcttaaccccacctctatggtagaatcatttggggaattcttagaaaataccagtgacggagccccaccccagaactttcagtcgagctctctggggctgtgacatgaacattggtatttttaataagcttccaaggaggttctaatgggcagccaaggggttattaatttcattgaacaaaagagcaaacaggattagagagattgacaaggaatatggacaatcataatgaaaaataataataagaggaggctagcaaatatttaatcgagcactcgtgatgtgccaagcactgttctaagtgtggcgtgtgagttatcagcttccctctgggccagggactgctgatatcacctgatgttcaggatgttaagtgacccacagccatgaaggaatcacgccaggatttgaacccaggcagctggttccagagtcatgctccaaactctagcttagactggtggggtctcacagctttgctccaacatccacccctctgaggttcacaaagcggaagattagaatatttttgtgaagtcccactcctacttggagatcgaggctctgagataagcagtggctggctcagggtccctcagcttgtggtggcaggtgtggaatttgaatcgagggctgtcggaccctgcatggggttggtgtcttctccagtctgcactggccctttccaaatcctcaaacacctttactagccctggaaaagaggcctctacatgatccactcccccacatctcacccaaggccacagacatcaggatgacatccaaaacatggatccactagttgccttttattcatttatatatattttttgagacagggtctcactctgttgcccaggctgcagtgcagcagcatgatcttggcttactgcagccttcacctcctgggatcaagcaactctcttgcctcagcctcctgagtagctgggactacaggcgcctgccaccaggcccagctaatttttgtatttttagtagagttggggtttcaccatgtttgtcagagctcgaacctctgagctcaagtgatctgcccaactcagcctctcaaagtgctgggattacaggggtgagccactgcatccggccactctttgccttttaataaatactctgagcgctcccagcaaccttgtaaggtatctgctgtcatccccgctctgcaggtggggaagctgagcctcagactagggggcaggatttgaacataagccccacaactaggaaccagctaagctagaacttgaaaccaggtcactgtgactgcagaccccaggtcctagccattgcactaggaagattattcagaaagttcaggagaaaaagtggtagggcctgagctaaggtggtggccagggagccagacttttggggcctaagaaatgaatgtgagagagaagattctagaattccagacaggaagcacattgggccttaataaagatcattagcacttagtgagtacctgctttctctgctgggtgctgttctaaatttctttccaatatgatcttattgaccccctccccatccacataaggttgtgaggtagggattatcaccctctttttcccacagcttggagaggggaagccatttgcccaacagaagctgatagtggctaaaatattgagcatgcagtgtttcaaggtccatgttctgttttttgtttgtttgtttgttttagacatagccttgctctgtcacacaggctggagtgcaatggcatgcttacagctcactgcagctcaacctcctgggctcaagtgatcctcctgcctcagcctcctaagtagctgggactacaggcacataccaccaagcctggctgattttttaatttgttgtagagacagtgtttcacaatgttacccaggctagtctcaaactcctggactcaagtgatcctcttgcctgggcctctcaaactgctggatttacaggcttgagccactgctgtgcccagctggggttcacattaaaccctctgcatgccacatgaacttgtggatgactcccaggcaccttatgtaggaagcactatttctgtccccgttagctaaagacactgagaccctgaaaggttgcttgctggagccacctggcctgaaaatgttacaggtgtgattcaaactctgccctatttaagacctgtgcttaatacatgtttgttgactgaccaactgatgatggggatggtggtgttgtccagtgaaaagtgggacatccagggctccagaaacccagtttctgccactaataggctgtttggctttgagttgctaagagtctcagtccctttcctgggacccttggggcagggagggaaccccttcgtagaacaccccgctctgagaaacacggaagatgcattatgtgatttcacactcagaacacttctaggtgatgggttaaaagccgcattttccagggctggaaactgaggtttagagaggacacatccttcattcaaattcacacacagctcaaaaatgctgcatctgaatttgaacactggatggcttcaaagtctgagtgatgagcctgagagtttgaggctgcagtgagccaggatcgtgccactacactccagcctgggcgacagagccagactctgtcccacccgcccccgtccaaaaaattccgagttagcctagggctcccaggtaggatgagtgatgtaagagtctccagacccatatctggcgtgtgttgcatgggccccgcctcggcctggctggtttttatccatgatctcccctaatccccacagcctttgtaatgaggtggggagtgtcgccctcggtttcccaaggaggaaactgagactatggggaaagtcaccaggctgaggggagcgggggggcaggtctgtcttcagagccccgagggctggagcagccattcctgacccttccaggagggcttccccagctgtctcccaccctgtgggggtgcaccagcctttgttcttccccccagccttgttgaccagctcaggtttccgttcccagggtgtcgccctggaaacaaggtgtggctggcaggaggggccagggtgggagggtggcgtggggagtgggttcctccgccagccaggagtgggggccggggcgccggcagccatgagataccctcccagggaatgtggtccggccgccccaccctctgagagctggggggagctcccggagcagccctttcaggcagggagggcagacacccagcaaaccggttgttctgctcctggctggccacccaggccacccaccctcccaccgttagaaggttggcacctgggaccaggcagcctgtggtggccacaccctactgtgcttgagaagctcaagctccctgggagcttaaaacagttctgctggccgggcacagtggctcatgcctgtaatcccaggcatgccggggtgggaagatcacttgagccaggggttcaagaccagcctgggcaacatagtgagacctgatctctacaaaaagtaaaaattttaaaaattggccaagcatggtggtgcatacctgtggtcccatctgcttgggaggctgaggtgggaggattgtttgagcccaggaggtagaggctgcagtgagctgtgttcatgccactgcactccagcctgggtgacaaagtgagatcctgtttctaaaaaacaaaagaaaaagatagtcctgctgctaaccagcttagaaaccagctagctgggtgactagcagagtaggttaccctactttatcacacacagctagaaaacacatctgaatttgaatcccgggtggcttcaaagtcaagcgacaagcccagagtagctaactagctaagccactaagcaggtaattctctggctagtttagctagctaactttagatagcttggctagttagctctctggctggtttagctaagtggctaactagctctctagctatgtttaactgcttctgtgagtgttgagcccctcttgcctacatgatacccttgtgagctggatttgttcttaaactgttacagagtcctgaggccgggtgtgaaggttcacatctctaatcccagcactttgggaggccgaggtgggcagatcacttgaggtcaggagttcaagaccagcctgggcaacatagagagaccctgtgtctacaaaaaaatacaccaggtgcggtgactcaagcctgtaatcccggcactttgggaggctgtagtgggagaattagttgagcccaggaattcaagagcagcctgggcaacgtagtgagaccccgtctctactaaaaataagaaaaattagcctagtggattgacacacacttgtgatcccagctactctcgaggctgaggtgagaggattgctttagtctaggaggtggaggctgcagtgagccatgattgtaccactgcactccagcctgggtgacagagtaagaccctgtctcaaagaggggaaaaaaaaaaaagactaggcatggtcatgtcagcaggactgttatgtgtctattatcagtagaaaccgcaggtatgttcctgttgcatttcggttattgcagataccacaggcacccttccagagatagtccatgcatattcaaatgaatatataaaaatatataaaaagattcctcttccatcctttcttttttttttttttttttttttttgagacagagtctcgctctgttgcccaggctggagtgcagtggcgcaatcttggcttactgcaacctccgcctgccaggttcaaacaattcttctgcctcagcctcccaagtagctgggactacaggcatgtgtcaccacacctggctaattttttttgtacttttagtagagatggggtttcaccatgctggccaggctgggctcgaactcctgacctcgtgatccacccgtctcggcttcccaaagtgctgggattgcaggcgtgagccaccgtgcccggccctcctcttccatcctttctaatgcaaatggtagctcctcacgcagtcctcaactcacctccttttacttgatattgatttgaagacagtcccatgtctatacataagagctttgtaggaatgcatcgtatgaagatgcattcaggtcgtttctagtcttttgctgctacaaagagtgcctcaaccggtcacctcgcacatggtcatttcctgtgtgagtccaggcagccacaggctgtgacccaagtctggctggctgcaaaggccttgttctctctcaggacaaatcctcacccagacagtgcctttgtgcaatttggaaagattctttgctaccatcagcctgaaaatgctcataacaaacattcaaatctacattgttatggtgtagacataccatgtgcagatagatgcccttgtgcagtgcacggcctgctcagcagccccatgacgcctttcaggccgtgggcagccatctgagaccctctcccctctcacccactgcagacgtactccggccttttctgtgtggtcatcaacccgtacaagcagcttcccatctacacagaagccattgtggagatgtaccggggcaagaagcgccacgaggtgccaccccacgtgtacgcagtgaccgagggggcctatcggagcatgctgcagggtgagtgctgggtggggctgtaggccagcgaggcggctcttcaacgggggcctgacctggggctgccggaagccagagtccaggtcaaatgacagcttgtagacttgactctgtagggcttcttagggggctggagggagcacaagtagaggcctgagtgggtgaggtgctaggtcctagagtctttttacctgtctccatgttcattgtctcttttattattgttattattattattagtttgagacggagtcttgctccgtcacccaggctggagtgcagtggcatgatcttggctcactgcaacctctgcctcctgggctcaagcgattctcgtgcctcagcctcccaagtggctgggactacaggcgtgcaccactgcgcctggctaagagatggggtttcaccatgttggccaggctggtctcaaactcctgacctcaagtgatctgcccacctcggccttccaaagttctgggattacaggcataagccaccatgcctggcctctttttaaatttttaaataaattaatttatttttggccaggcgcggtggctcacgcctgtaatcccagcactttgggaggctgaggcaggcggatcacgaggtcaggagatcgagaccattctggctaacacggtgaaaccccgtctctactaaaaatacaaaaagaattagccgggcctggtggcgggcacctgtagtcccagctactcgggaggctgaggcaggagaatggcgtgaacccgggaggcggagcttgcagtgagccgagatcgcgccactgcactccagcctgggagacacagggagactctgtctcaaaaaaaaaattaatttattttttatttcaatagtttttgggaaacaggcggggtttggttgcatggaaaagttctttggtggcgatttctgagattttggtgcacttgccatcggagcagtgtacactgcacccaatgtgtaatctatccctcaccaccccccactacccttcaccctgagtccccaaagtcagttgtgtcattcttatgtttttgcatcctcagaacttagctcccacttacaagtgagaacatacgatgtttgattttccattcccgagttacctcacttacaataatggtctccaatttcatccaggttgctgtgaatgccattatttcattcccttttatggctgagtagtattccatggtgtatgtgtgtctatatatcccatggtgtgtatatatatattttttatatatacacaccatgggatatatactctctctctctatatatatatatatgagtattccatggtgtgtatacactcacacacacaccatgggatatatatgtgtgtgtgtgtatacacaccatggaatacatatatatatgtatcacagtttatctactcgttggttgatgggcatttagtctggttccatatttttgcaattgtgaattgtgctgctataaacatgtgtgtgcaagtgtctttttcatataatagcttcttttcctctgggtggataccccagagtagggttgctggatcaaatgatatatctacttttggttctttaagtaatctccatactgttttccataattaaaaaatcaaaaaataacatgttggtgtggatacggtgaaatgggaacacttttacactgctggtggaatgtaaactagtacaaccactattgaaaacagtatggagattctttaaagatctttgttccctctttctccgaacaatattggttgggtgtggggcttttacgaacatttcccttgagacagtaattcccagagtgttcattcatttattcaacatttatcgttgaattgtagatctgatctccattgtcacggggtaaatgtagccccttagacagatggcaggtcaaggcagttgtgtacagctgagcaggttgtacactgaacaagggtatccatccaaggggctgccattcataccatgacaacatagatcagtcctggcagaattacatgattaacatctattatagatataatgcccttattatatatttgctatatatcatctattttcatagatatttagtattttttgtttatatctattaaacatttaaaaattatatctatttacatcatataacatataataggccaggggcggtggctcacacctgtaatcccagcactttgggaggccaaggcaggagaattgcttgagttcaggagctcaagaccagcctgggcaacataacaagaccctgtctctacaaaaaaatttaacaagtttttgttaaaaaaggaaaaaccccatgtaatagtacacaacattcagacccttcgatcatggcttcgaaacccatcggtgccgctcgccatttccgtcccgcaccccagcctcacccaccttcctgtctgtcaaacatccctaagtcagtcctacctcagggcctgaatatgaatatattatacttattgaatatgcatattaaatatgagcaaattattaaatttatatatttgattaaatagtataatattgtgaatatattatgcttatttaatatgcatattcaataagtattttattttattatactttatttttattatacttcatttttattttattatactttatatttattttattattatataaatgtaatgttgatttaataaattatacctattaatatgcatattcaataagtataatgtgttaaattaaatagtataacatattaaattaaatggtatattaaatagcataatattgtaaacatattatgcttatttttttttttgagacagagtctcactctgtcacccaagctggagtgcagtggcatgaccttagctcgctgcaacctcctcccgggttcaagccattgtcctgcctcagcctcccgagtggctgggactacaggcacatgccaccatgcacagctaatttttgtatttttagtagagaccaggtttcaccatgttggccgggctggtctcgaactcctgacctcaggtgatccgcctacctcagcctcccaaagtgctgggattacaggcatgagccaccatgcccggcctaatatgcttatttaatatgcatattaaatgggagtatcaaatgggaatactgaagtctccaggtagaatagtggattcatctatttctcctggcaggtctatcagtttctgctggattaattcatttaacctcgtagcaaatctatgaaataggttatctccttgtccctgatttctgggtggggaaactgaggcacagagcaaaacagtcatggtcacactggtgggtgtatgctgaggtgggattcgaacccagggcccctgaccaccgcctccctgtatgtcacactgtgtgttatatttcctcctgtgccgtgcactgtgctgagtgcattttgagcattctgagttctgactacagccctgggagatggcagctgttttgagccccatttttcagatgggaaaacagaggcacaaagcaactcagagactggcccaaggtcacgcagcaagtcagagaggcagccgggcggtgaacctgtgtgcatatagtcccccataccaggctgccaagtctgaggtcctactggacgcagcttactccctggcttgaagacacccagaggatgcctgtcctgcttaaaaaaacattcagaccctttgatcatggctttatttatttaaatttatttatttagagacggagcctcactcttgtcacccaggctggagtgcaatggcacgatcttggctcactgcaacctccgcctcccgggttcaagtgattcttctgcctcagcctcctgagtagctggggattataggtggcgccaccatgcctggctaatttttgtatttttagtagagatggggtttcaccatgttgcccaggctggtcttgaactcctgacttcgggtgatctgctggcctcggcctcccaaagtgctgggattacaggtatgagccactgtgtccagcctaatcgctgctttaaaacccatcccaccactcgccatctctgccctatcccccaacctcactggcctttctgtctctcaaacatttctaactcagagcctttcccctggctgtgccctctgcctgaaatgccacctccactgagaagccttccctgctccttcccccaagtcaattcttattacctaacaccagggttttggaatcctggctctactgacatttggggctggatgattctttgtcgtgggaggctgtcctggtcattgtaggatgtttagtagcaccccggcctctacccactcagtgcccatggagctctcctctctcagggtaataaccaaaaatgtctcccagacattgccaggtgtctcctggcgggaatggaggacataattacccccgtttaagaaccactgcttcggccgggtgcagtggctcatacctgtaatcccagcactttgggaggccgaggccggtggatcacgaggtcaggagatcgagaccatcctggctaacacagtgaaaccctgtctctacttaaaatacaaaaaattagctgggcgtggtggtgggcgcctctagtcccaggtacttgggaggttgaggcaggagaatggcgtgaacccgagaggcagagcttgcagtgagccgagattgcgccactgtactccagcctgggcgacagagcaagactccgtctcaaaaaaaaaaaaaaaaaaaaagaaccactgctttattctagtactgattcaattttcttcccagtgctgatcggtatttgattgtaggtttctgtcccctacatcttaagtggaagctctgtaggggcacacaccctgccagttccccactcccctccatgcctggcgctcagtaggtggtcagcatgtgattgtggaatggctgtgttaggcccagggcaggcgctggggtagacatcttatattacaggacctcgcttctgtctttgaatctcacatgcccagcatgaggcagcacacagtagggtctcacgttgaggtcgttgaatgaatcatattctcttcagttgagggaggctgtctccattttacgggtgaggaaaccaaggctcagagagggacagctgctttcccagggtcacacagcgagcagggggctgagctgggtggggaattagaatccaggattgttacacatcaagacccaagcttttccttactccctgggaataatttttaaaatgcagcggccagtgtaagggaccagagggccctgctagagactctctcagatgacatattcccccactctgtcccctacagatcgtgaggaccagtccattctctgcacgtgagtaatctggaaggacttcctggaggaggagaggtctgggtggggcgtggctgtgtttggaatgggcagggcaggtggggagcttgcctgaggtcattgccaacccctttgcttccccttgtcatccccacagtggagagtctggagctgggaagacggaaaacaccaagaaggtcatccagtacctcgcccacgtggcgtcgtctccaaagggcaggaaggagccgggtgtccccgtaagcaaccccgccttgggtcacccccgggccctgccacagcactgccccttccatcttgggctttccccacaattgtctcttcccctcatggaggtccttctcctagacgcctatgccacctgagcacctactgtgtgcctggggtggggctggaagcagagtcagggggacacagaggtgtgagggtcagtcttggtctcactggctctcggaatggctcctagtacttagtaggtgctttcttttctgagcacctactgtgtcaagcctgattttaggtgatcatgatgcctgggtttgtcgtctaagtgaatgttatatggtgccctccactgttccaagccctgttctcacactgccttacttacccctcgggtggggtgggtgctgttttcctgcactgaagacggagagcccaggcatgggaggggtgagtcagttgttggtcatgcaccgaggaagaggtacagtgaggccgggcacagtggctcatgcctgtaatcccagcagtttgggaggccgaggcaggaggatcgcttgagcccaggaattcaagaccagcctgggtaatatagtgggaccccatcgctacaaaaaacatttttgaataaaggaggtagagtgggattcaaacccaggagtgtggtcctccaggccaccctactccacatgcccggtttccccagtcccccttcccccaccccccatgccaccacctgagatcactggttcacctgtgtgtctgtccacgttccatgtgctgtgtcctggtccgtgtctcgtgtcccgtgacttcctcaggcctccgtcagcaccgtgtcttatgtgagtagcaggggatcacctcgagtcttgctgcccctaatgccttcccggccacccaatgcatgatcttcttggtagacagggcccaaggcagcagtggtcccacctgccagggacccctctgccccaccactgctattcatggcggccctgctgtgtgagtgtgtgcagatgggccacagacaccaacatgaaacaatccagagaacaaaactgccacttactgctgatctactaaatgtgtccagccagggcccacagatgctgcgtgcacacaaccagagtgaacagtgtagcaagggaaatacacgcatgtcccatgttcttctgtgtgccaagtcatgtgcccttcactttgtgtatcttttcatttgacaaagcatccacctagctagatcatttcatcttaacacaagcaagacatggactgagagaagacataaacaggctgccatttatgaagcacctactgtgtgccaggctctgacaccaagggggctggagggaagtttggagtagagttcctgccaaggagtagcctggtggggctaggaacccactattttttgaaggcctattatatgccagactgcttgaagcactttacataggtggtacagatttttgccttacttaaaaattctaggctgggtttggtggctcaggtctataatcccagcactttggaaggctgaagtgggaggattgcttgaggccaggagttcaagaccaggctaggcaaaagagtgagaccccatctctactaaaaattttaaaaagtagctgggcatggtggtgcttgcctgtagtcccagctactcaggaggctgaggtgagaggattccttgagcccaggaatttgaggctgctatgagttatgaccatgccactgcactccagaatttctacaagcaacacatgagtacatattcattgtaacaacaacaaatcagatgaaatgaaattcctgtttcctcccctcagtccccttccttggagtgccttacactgttgacagtttggtgtgcatccttgcagacctttctccatatgtttacaaacatgtatatatctgtagatttaagagtcctgttttgtggcgtttcttccttaattcatttcttattaatgggataacattgtagacattgttctgcaacttgtttttttgtttggcttggtttggtttggtttccacttaacaacatgtcttggagatgcttccctcttcccctcacaatagacagatgggcaagacccggatatgggaagtgggtacacgcccagacacacaaaggcccctcacacacagatactcagtcagctggagacacagcccgagctgggctggcctggcctcctgccccattctcactgacctcatgcatcatctcctgtgcccggcagggtgagctggagcggcagctgcttcaggccaaccccatcctagaggcctttggcaatgccaagacagtgaagaatgacaactcctcccgattcgtgagtgccaggggtgggcagtgctggctgtgtcagggatacaggagctgggaacctcagggtgggcttcagggggaaagacacgtggatctgttgagggaggaggggctgggggtctggactcttgagtctgagggaggaggggctgggggcctggacccctgggtctgagggaggaggggctgggggcctggactcttgagtctgagggaggaggggctgggggcctgaacctctgggtctgagggaggaggggctggggccctggattcttgagtctgagggaggaggggctggggacctggactcttgagtctgggggaggaggggctgggggcctggacccctgggtctgagggaggaggggctgggagccccagacccctgggtctgagggaggaggggctgggggcctggacttttgagtctgagggaggaggggctggggacctggacccctgggtctgagggaggaggggctgggggcctggacttttgagtctgagggaggaggggctgggggcctgaacctctgggtctgagggaggaggggctggggccctggattcttgagtctgagggaggaggggctggggacctggactcttgagtctgggggaggaggggctgggggcctggacccctgggtctgagggaggaggggctgggagccccagacccctgggtctgagggaggaggggctgggggcctggacttttgagtctgagggaggaggggctgggggcctggacccctgggtctgagggaggaggggctgggggcctggacttttgagtctgagggaggaggggctggtggcctggacccctgggtctgaaggaggaggggctgggggcccagatccctgggtctgaaggaggaggggctggggccctggactcttgagtctgagggatgagggagtgcaggcccggatccctgggtctgagggaggaggggctggaggctgcgtgcctagttccaagggaggagcagctggggaccagggggctggggaaagaagtccaaggggcccggaccttgaattcccaaggagccccccgatggggactcaccacaggatggggttcaggtagagggagcaaggaagtgggggggcagccgcagctctgggagcagtgggtgtggggtttgggctgttgttcacgtgtgagtggggaaggggaccctctgctgaagcccacccactttggtctctcccagggcaaattcatccgcatcaactttgatgttgccgggtacatcgtgggcgccaacattgagacctgtatcctctcacagcccatgggggtggcagccaaggggggcagcctttcagacagcactgagtatggaaagcacctcccactgcagggaccccttacctgctactcagatgggacctgatgctcaggcggcatctgcatggggaggggagggtgggacttctggtgtgtatgaggccagcacagcctcgctatggggtggtgggttggggtccacccagttcagccataaggggagtcccagcacttagcctgcagtggcactcatggtgacccatgacagtgaaatgacatagagcagtataagcaaagggaaaaggcacgtggggccaagtccccagggaccaggcacaagctcctagaaccctctccagcagaggcacacaggacaccaggtgcgacaacacttatgaaatgctgtcccggggaagcacagagagactcactaccagggttttcactggtggctggccacatccccgcctgcaccccccgtcccccgcccttagtatgaaccaaaattccacactcccgggaggaaagcaggtgatcagtgtaaaccacagtgtttgcacaaaccctttaggtctagcgaacccctcatcctgttagaggatgctggaaccctcccgaaatccaggtgcccagacgctagccaggggcccacctggccagcaggcctttccaggggagcatctcaggacggctgttttctgctcagatggcatatgggcgtttaaaggaaattaaacaataaaacacaggcactctgggagtgcagaaattaagagaatgggccaagaaatcgtaccaacctgggttcaaatcccagttctgccactttgagactctggggacttgggtacgtgacttggcctttccctgcctcagtttctccctctgtagaaggagaaggaacatagaacctacccaagaggggtttggaggattttggagttaaatgcttggccacagcacctgctacatagcaggcactcaagaacaagctattattagcaattaatgattaaattagtggccaggcacggtggctcatgcttgtaatcccagcactttgggaggccaaggccggtggatcatttgaagccaggagtttgagaccagccaggccaacatggtgaaaccctgtctctaataaaaatacaaaaaaattagccgggcgtggtggcgcatgcttgtagtcccagctactatggaggctgaggcaggagaattgcttgaacctgggaggcagaggttgcagtgagccgagatcacgccactgcactccaacctgggtgacagagcgagactctgtgtcaaaaaaaaaaaaaaggttaaattagcaatatctgtatcaatgctaatattattgactaatattgattgataattactaatcaataacattaacaactgctaataagccacatccccatcccagaggcatctgataagctcacgctcttccataatcagtggggaggggtttctcctaagtctgctcagggcatgaagcagccagccggcccgttggttctgctgccttgtgggagatgcttcctgggctgtcaccaccccaagtccccagcagcaccgcagcccctgctcctgccgttttctgctcatggctgctccttcctccaggtcctcttgcccttggctcccacctctccatggtacctgcatatccaggttcttggagctcatggctcttcctgccaaactgtcctggcacttgtgtgtctctgcttatattcatatttgccttctctgtccgcttccacctgctcactttctcctgtccacgctccccatgcagtgtggctgcccctcctgggcacagctgtggtcccggctgtctcaggcaccagtggattgatgctcatgaatcaggtcccgcccccaggccaatcgtatgagtcttgggatggcctgccgggtaaggagcaccaccctgtgtggctgacccctcggcactagcatcagtgccatcgtgaccagcttttctggagtgctgactgtgtgcccaccgccacctcgagagtccccatgatatctcagttcctcctctctgcaaccctgcgaggtggctgctgctatcacccccgcttcacagaggaggaaaccgaagctcagggctgttgtcccccagggttcgacagcctgcgtgtgctccctgccttccagctttccttgtgggagcccctccacctgtttctccccatctaaccaagcaggttacaccccagggcttctgggaaatggacctcaggtttgcagctgatcttggtccaaatatgtatttggtggtgcatgagtgtggtggtgcatgagggacacagaggggttaagcaaagtgtatggtgttttggtgttttgttttactctaagatgttttggctgggcgcagtggctcatgcctgtaatcccagcactttgggaggctaaggctggaggatcacttgagctcaggaattcgaggccagtcagacctcctctctactaaaataaagaaaatttaaaaattagccaggtgtggttgtgcacacctgtagtcccagctacttgaggctgaggtgggagtattgcttgagctggggaggcggaggttacagtgagctgtgattgtgctgctgtgctccagctgaggcaacagagccagaccctgtctaaaaaaacaaaacaaaacaaaacaaaacaaacaaaagtcttgccaccttttaatatgtaagtttgacacgtgactttcttgggagggagagcatgcagagtgacagtctagttgaaggtgggagctgattatctgcatggggaagctgaggctgggagagtactaatggcaggagacattctcacctgcgggtaactttgaaccaggcattgttcagggtgcttcatgcacaataagtcatttatcttcacagcaactcatccagggtcgatgaggtttctttgttttgtttttgtgacagagtctcactctgtcgcccaggctggagtgcagtggcgcaatctcggctcactgcaacctcctcctcccgggttcaagcgattctcctgcctcagcctcccaagcagctgagattacaggcacccgcgatcacacctataatttttgtatttttagtagagatgggattttgccatgttggccaggctggtcttgaactcctgacctcaggtgatccgcctgccttggctttccaaagtgttgggattacaggcgtgagccactgcgcccacagggttgatgagttttttagagacagagcaagaccctgtctctaaaaagagagagagagagagaggaaggtctcctaaaggtgttattttcaagccccttgaacaggtagatgaggaaactgaggcacaagtgcttaagtgacatgagcacggctgctcttccagttagtggcaaagtcaccagcctgggctgtgagcgactccactacaccacaggagagaagggggcagcgtgggcagggcaggctcctgtagtggcctggcagcgtcggggccgtcccttcccctctagcaccttgactcgctgtgtccagacctgctggagaagtcgcgggccatccgccaggccaaggacgagtgcagcttccacatcttctaccagctgctggggggcgctggagagcagctcaaaggtcagtgccgccccgtcctaccctgctcacccgggagagggtgggcaccatgtctctcgggggccccttctggggaggaagcaagagtggggggctctaatatccgtcaaacaccgacttcgcatgaggctcccgcagcccctgctctcgctgcgtagtggcgtctgtcgcacggtgggttctgctgcgctctggttccagctctgtcccgggtctggctcgcgcccgctgtcacggccacgcagcccccgccgcctggtggctcctgctcacgctcgcttccgaagctccgtggcttctctctcgcgcggcttctcctcactccggcgggtgactccggctttgctgaggctcctcctggttcctgacgacgctggtttgtgttgcttctcggctcgtgctgcctcgtgctcccctctgctctggctcctaggccacggctcttgccggagtcctcctgtccctgctccctgttcctcctgccctctggctgcccaagcgcccttggctcctgtttgcagtggctggcactgccctgtagctccctctgctcctggctccttcctcctggtggctcaggccgcttcctggctcctgcggccacatagcccctcctcatccaggttcccactcactgtggcctttgagaccgcatgtccttgggcgccggcccctgccatcccatggcctgtgctgacttgggcctgcagccccactgcttctgccaaccagtggcccctgcctgctctgggcacttctagagactcaaaagtccctgcggagggagcaaagaggagtggtatacactgcgtggggactcatgcctgcaatcccagtactttgggagggtgaggcaggaggattgcttgagcccaggaatttgagtccagcctgggcagcatagtgagacccccatctctgtaaataataacaataataataagctgggcatggtggcacacagctgtagtcccagctatgtgggaggctgaggtgggaggattgcttgagcccaggagtttgaggctgtggtgagccatgattgcatcactgcactgcagcctgggcaacagagcaagaccctgtctctaaaaaattaaaaaaaaaaaatagagacagagtggtggtctcataggtgctaaacgcccactccacccccgacccttcccaccacacttgtgagtaaaggcccccacccacttgacagtgaggatatggcatgtcctgggattgccaccgatgaatccaggatgagtctgactgcacagcccacctttgaccttgaccccactcattgtccctgcagccgacctcctcctcgagccctgctcccactaccggttcctgaccaacgggccgtcatcctctcccggccaggagcgggaactcttccaggagacgctggagtcgctgcgggtcctgggattcagccacgaggaaatcatctgtgagtgagccccgtggaggccaggggtaggggggaaccccacggagagctggggacctggccattcatgccccgatctctttgagcaagtgtttattgagcacctactgggtgcaggcaccggggccagagcagggaatgaggctcacagacatctctgccttgaggaagctgacaaaatgagagcccccaaccaagtcaataaggaatcacatggcctgttagtagactatgagtgcagctgggcgcagtggctcatgcctgtaatcccagcactttgggagtcccaggcaggtggatcatttgaggtcaggagttcaagaccagcctggccaatatggtgaaacaccgtttctactgaaaatacaaaaaagttagccaggcgtggtggtgggcacctgtaatcccagctactcaggaggcttaggcaggagaatagtttgaacccaggaggcggaggttgcagtgagctgagatcgcaccactgcactgcagcctggtcaacagagcgagactctgtctcaaaaaaaaaaaaaaaaaaaaaaacaaaaagaccatgagtgccatggagaaagatgggggagggaggggcacagctttaagcaggggctcaggggagggtggactgagatggggatgtttgaacgaagtcctgaggaagtgagggaatgagcactggagatgtgggggaagagcattcctggcagagggaacagcctgtgcaaaggccctgaggcaggaaaggggtggcatatttgagggattgacacttctggtggtggagctgcagaggggtggggagtctcaaacgccagcctaggaggttgggactttgtcctggggtgctggggagctgtgggagggctgggagcaggggttggacaaattcagctctgggagcaagaagaccccttgggggccgtgtgagagacacactggagtgggtggtgctgagaccagaaggaggctgctgaggctctagggaaggctcaggacgctgtcccagggctgctcaggttggcccaggctgcgcggcactggttatttggtgttaaatgctcagctcatcacccccgtgtcagggtgctgtgcccacccccacttttttttttcttttgagagggagtctcactctgttacccaggctggaatgcagtggtgtgatctcagcccactgcaacctctgcctcctgtgttcaagtaattctcctgcctcagcctcccgagtaactgggattacaggcgcccgccacctcgcctggataatttttgtatttttagtagacatggggtttcaccatgttggccaggctggtctcgaacccctgacatcaggtgatccaccctcctcggcctctcaaagtgctgggattccaggcgtgagccgctgcgcccagcctgtgcccccacttttttcaccaaacagcatgttttgacagcagctctgtctcagtgctgcattagtttgcttaggctaacaaagtaccacaaacctagtgcctaaaacaacagaaattgattgtcttgtggttctggaggccagacgcccgggatcgtggtgttagtgagggtggttcatcccgggagaatcggctgcaggtctctccctaggctcctggtggttttctggcaatcttcggcgttccctggctcatagtcgcatcacccgatctctgcttttgtgttcacatggcggctccctgtgtgtgcatctgtgtccaaaattccccctcccccctccccccgacccccccgccccaacctttttgtttttttgagacggagtcttgctggagtgcaagtggtgcaatctcggctcactgcaacctccacctcccgggttcaagcgattctcctgcctcagcctcccaagtagttgggatcacaggcgtgtgtgccaccacacccggctaatttttttgtacttttagtagagacagggtttcactaagttggccaggctggtctcgaactgctgacttcaagtgatcctcccgcctccgcctcccaaagtgctgggattacaggcatgagccaccgcacctggcctcctaccctacactggtatgattttatcttaactcgttacatccgtaatgaccctgtttccaatactgtcacattctgaggtcctggggtttagatccccaacatgctttttaggagggggtggtgtagacatgattcaacccgtaacaagtacgtaggtggacctccgccttttcagaggctgcgtaatgtttcattgtttgcgtgaactatgattcttttaaccaagccctccaaagaaagacctttaggtgtttctgggctgagccagggccgcctctgggtctgattgtcttctggtctctggcgctgtgggaggccccaggagctattgttggctccagggccggattggaagtgctggaaatggagcgtagcttggctgtctacccaggctgcaaacagccgggcctcttgtggcctattgacacagggtcttgggcctctcccacccccaccccgccgcatttcccaaccagggttgcataattccccagcctgcatgactccgcagctgggcagctggcacacaaattcagactgtggctgcaatggggacctgggcctcccagcctgtcctcttaggtcctgcctggcctcttgtcaccatgagctcatgtgaccctcctggcagctgccctgctgtgtggcaggcgcaggcagcagctctgatttttggaattcagaaataaaaactttgcagcaacctatgcatgtagtaacataaactgaatgtggctaaaggttgtactgacaaaaccaagccttcccactcttccctggccctagtttcccactgttgagcttcttgtatctccttccagaaatattttaagaatataagaaaagacacatattatttgtctataggaggaggcattctctaaccccacagctgatgttcagctgtcaacatcactgtggtgataaaaaaaatgtgaagcaatttctctattggttcaaaagttccggccaagtgcagtggctcacgcctgtaatcccaacagtttgggaggccgactgaggtcaggagttcgagaccagcctggccaacatggtgaaaccccgtctctactaaaaatacaaaaattagccagacatggtggtgggcgcctgtagtcccagctactcaggaggctgaggctagagaattgcttgaacctgggaggcagaggttgcagtgagccaagatctcaccactgcactccagcttggagcagagcgagactccatccaaaaaaaaaaaaaaaagttcctggatgttggttgctccagctggccccccagctccctacccttccactagagacccccctggaccctggcccagcactctggcctaggttagtctgggccaggcagtgctagagttaaatactcagcttgtcattggctcactcctgtaatcctaacactttgggaggccgaggtgggagaatcacttgaggccaggagtttgagaccagcctgggcaatatggtgagaccctgtctctactaaaaattaaaaaaaaaaaaaattaaccaggtgtggtggtgcaaatctgtagtcccagctacttgggaggctgaggtgggaggattaagtccaggagtaggagactacagtgagctatgattgcaccactgtactccaggctggtgatagaatgagaccccatctcaaaacaccccaaaacaaagaaacaaattactcagctcatcattcccatggaaggatgctctggaccccctctccactgccctttcctacagactggtatattttggccatagttgtggttcaaaatagatggacctcattcctttttgcagctgcgtaaggttttattgtttaaataaactatgattctttcagccaatcccttgcagatagagccttaggttgtttccattccattactattggaacaattaaaaaaaaaaatgctaagccagcgcagtggctcacgcctgtaatcccagcactttcagaggccaaagcaggcagcttgcttgagctcaggagtttgagaccagcctgggcaacatgatgcaacctcgtctttacaaaaaacacaaaaaattacctgggcgtggtggtgtgcgcctttactcccagctatttggggggctgaggtgggaggatctcttgagcccgggaggtggaggctgcagtgaaccgagatcatgccactgcactccagcctgggcgacaaagtgagactctgggtcaaaaagaaacaagctaccgtgaatatccttgtaaacaggttcttgtgctcttgtggaaacagacctgtaggttcaattcttagaaacgaaatgccagctgggcgcggtggctcacacctgtaatcccagcactttgggaggccgaggcaggcggatcatgaggtcagaagtttgagaccagtctgaccaacatggtgaaaccctgtctctactaaaaatacaaaaattagctgggcgtggtggcacatgcctgtaatcccagctactcgggaggttgaggcaggagaatcgcttgaacccgggaggcggaggttgcagtgagccaagattaagccactgcactccagcctgggtgtcagagcaagactccatctcaaaaaaaaagaaaaaaaagaaatgaaatgccatttccaaggagacttgtgattcttgtttgcgttcagcattaaaaaaatcgaacagctttaagatataattcacgtcacaccattcacctatttaaactgtgcaattccatagcattttgtgtattcatagagttgtgcacctatcatacagtcacttttagaacattttcagtagcccaagaagataacgcataccctttagctgtccccccaggccctgtccacagcctctggcaaccactcttctgctttcggtctctatggacttgcgtattctggacatttcatagcagtgaaatcatgccgtatatgatcctttgtgactggctgctttctcttggcatcattttcaagtttcatccacattgtagcatgcagtaggtttccttcctttttattgctgaataatttttattgttatcttcttatcatggaaaatttcaaacatgtatgcaaacagagtgcagaatgtaatgaatgccccaccaccaccagctggcagctgtcaccagctccatcaatgatgaaccggtgacctcttgtgtttcatctctccccaacctccctaccccaactcaggtgtgaacatttttttttttttttgagacagagtctcgttctgtcacctggggttggagtgcagtggcacgatctcgactcactgcaacttccacctcccgggttcaaacaattctcctacctcagcctcctgagtagctgggattacaggcatgtgccaccacacccgctaactttttttgtatttttagtagaggcagggtttcaccgtgttggccaggctggtctcgaactcctgacctcaagtgatccacccgcctccgcctcccaaaatgctgggattacaggcgtgagccaccgcacccggccatgagcattttttaaattgcagagaatctacctcgtcgctgtccacagggtggcgctagtttccagttcctccagcatatacctggagcacctgtgtccccacctgcacccagcaacgatggctggagcttttttgtctttgctgatgtggcagatgaatgagctctcattacagtttcattctgtgttttgcttacaaggagtggagttagtcaccttttcacagactttttttgacaagagacagagggtcagggaggtggggtgtcctgtcctaggactcaccccaattcaagaggaggaggcaaagccatggtggaaacgtctgaccccaaagccagcccatgatccagagagagaggtggacacctcagtgtcacccacagggagcccaaggcagaaagcatttggggccaatcaaggcagggtgtctgtccatctccttccccattttacatctctgcctgccaccccttggcaccataaatgccatgctgagaggttgagcaggtagcctgggacacagggaggcatgccagcctctcacatgaggcatccgcaggctgggcttgctagtgatgggcgagtctgatgtcagcaacaagagctgactgccaggtcctcagggcatcagatgcgccctggggcctggcacaaacacagcttcctaagccaactgcaagaggccattttaaaggccattgatggaagccaggtctggacggggtctaagctgatgttaaggaatgatcattaagtttgctgggccagatgcactgtgggtctgtaaggatgtgtccttctttatttatcttttttattttttattttttttgagatggagtctagcgctctgttgcccaggctggagcagagtgcggtggtgtgatctcagcttactccaacctccacctccctggttcaagcaattctcccatttcagcctcccgagcagctgagattataggcgctcgccaccacacccagcttatattttgcatttttggtagagtcggggttcaccatgttggccaggctggtctcgaactcctgacctcaagtgatccccttgccttggcctcccaaagtgctgggattacaggtgtgagccaccacgactggcctaggatccttcatttaatcacatctgcaaagtcccttttgccatggaaggtcacattcacaggtcccagggattaggttatgggtatctttggggtctgttattcatcctcccacctcctctgaaaacatcagcatgtatttcctacgaacattcctttatacaaccacagaccagcagtgtcaccaggaaatcgagttcagcacagcactgttatccagtccacagaccttaggccagttgtcccccaacctccaaaaaaaaacaaaaaaaattctctcttgcgcatgatggagtctcactctgtcccccaggctggagtacagtggcgcgatctcagctcactgcaacctccgccccccagattcaagcaattctcctgcctcagcctcctgagtagctggaattacaggcatgcgccgccacacccagctgattttgtatttttagcagagacggggtttctccatgttggtcaggctggtctcgaactcctgacctcaggtgaaccgcctgcctcggcctcccgaagtgctgcgattacaggcgtgagccaccgtgcccagccctcttgctctctttttttcctggtcatccatctctttactctccttcagtctgaaactcttcctgagtctttctttatcattcatggttttgacacttgggaagattacagactggttgtttcatctgtatctgggtctgtttccctgcaattacattctagttacacgtttttggcgggagtattccagaagaaatgctgacctcccacccccactcacacacacctttttctttttcttctttttttgagacagtgtctcactctgtcacccaggttggagtgcagtggcccgatctccgctcactgcaagctccgcctccccggttcatgccattctcctgcctcagcctccagagtagctgggactacaggtgcctgccaccacgcctagctaattttttgtatttttagtagagacaaggtttcactgtgttagccaggatggtctcgatctcttgacctcgtgatctgcccgcctcagcctcccaaagtgctgggattacaggcgtgagccaccgcgcccggccacacacacctttttctaagccacctttgtgtagaagtacagtatacacaccaataaaaggagcacaggcccttggcatccagcctgggggagttttgggagggaacaccctgtatatccagcacccaggagccccccatgtcccttcccaccaccagcaccccctcaaggtaaccattattccgacttctaagagcatggagttgtgttgcctcttcttggatttggtacaaatagaatcacacggtgtgcagtttctcacctggcttctgtcactcagccgtgtgtttgtgacattcatccatgtccagtgagggaagggggctttggagaggccagttccacagacacattcactttgtaaacgttcctggagctggatgtctatagtatgtgtccttttctgtatgtgtgctgcgcatatgtatttacattcataaacctatgctacgccggcacggtggcttatgcctgtaatcccagcactttgggaggctgagttaggagaatcgcttgagccggggaatttgagaccaacttgggcaacatgccaagatcccatctggacaaaacatttttttaaattagctgggcatggtggtgagcatctgtagtccagctactcagaaggctgtggtgagaggatcgcttgagcccaggaagttgaggctgcagtaagctatgatcacaccacaccactgcactccagcctgggcaacagagcaagactctgtctctttaaaaaaaaatctatgctaaaatgaaaaaggaaaatggaagcacagaaattaaaagcactgcctcccaggccaggcacagtggctcatgcctgtaatcccaacactttgggaggccaagtgaggaggacttcttgaggccaggagttggagaccagcctgggcaacagaatgagatctcatctctattaaaaaaataaaataaaataaaaaaataaaaacagaaaaacaaacaaaaaaacccaaaaaaacaaccacagactgccctggtttgaatcccagctctgccagcctatgtgagctgggtgatcttgggtgagttgattgagtgcctcagttaccctatctgtaacatgggaagcatagaaggacctgccttgttcagtggttatgaagggtacctgaagtcatttgtaagtgtttggaacaggttgtggtatggaggaagtgaaaaataaatcaaggtccatttcagtgcacaaatggtacaaactgttctagaatgaatggttgaccaggcggctgaggggttgcactgacctatggccccaccatgaaagcatcagatgcagccaggcttggtgactcatgcctgtaatcccagcactttaggaggcccaggcgggcggatcacgaggtcaagagattgagaccatcctggccaacacgatgaaaccccgtctctactaaaaatacaaaaattagctgggcgtgttggcatgtgcctgtagtcccagctacttgggaggctgaggcgggagaatcacttgaacccaggaggcagaggttgaagtgagccaagattgtgccactgcactccagcctgatgacacagcaagactctatctcaaaagaaaaaaaaaagaaaaagcatcagatgcaaacacaaacacagcctcacctgctgtccccttgactcaaacaccacacacagctctgctgtcaggggagagtgttctgaaaaggtgatcaattttgattgagtcctgagcaaagcaaagaacagccttctctgggatttacacagtggctgtcctcctggaaaattcactgtatattaattttttttttttttgaggcagggtctctctctcattgcccaggcttgagtgcagtggtgcaatcatggctcactgcagcctcgactttccaggctcaggtgatcctcctacctcagcctcccgagtagctgggaccacaggcatccaccaccatggccacctaattttttgtatttttagtagagacaggttttcactatgttgcccaagctgatctcaaactcctggactcaaatgatcttcccgcctttgccctcccaaagtgctgggattacgggcgtgagcccgtaccaccaccaccacaccgcaccaagcctcactgtgtattaaaaccaagcacaaaacactgctgtatttatacgtaaaactgttgggaatttgttgcagataattacaaaccatgacttcatggacgcaaatgtccagggggccatttttcagaagccatgtgggctgtagaaaccgtccgcatccaagtggactgcctagtcctggtgacgtccagaaacacccgacccctccacaagttcctgagacatattctagggggcagcactacccacttccaatgcactttctagaactctgcacagcctactcgccaaatctatttgtaacccccaattcaaggtccatttctgtattagtcatgctgctgataaagacatacccaagactgggtaatttataaagtaaaagaggtttaacagactcacagttccacgtggctggggtggcctccacaatcatggcagaaggcaaaaggcacatcttacatggtggcaggcaagacagaatgagagccaagcaaaaggggtttccacttataaaacctcagatctcgtgagacttattcactaccacgagaacagtatgggggaaacagcccccaagattcagttacctcccactgggtccctcgcacaacacatgggaattatgggagctacaatttcaagatgagatttggctggggacacagccaaaccatatcaatttcgatccacaaatcgtgaaaactgttctacaatgaacagctgatgatgtggctgagggattgcattggtgcatagcatcaccatgaaatcagtactcctggtgtgttcgtggtcatttacggtcctgcgtagaatggaggaaaatttgagtcaccgagtgcacactcagctcacatcagacaggggtggtgttctgccttctggtttcagttctcatactgtacagtgtcctttcctaaatagtgccatgttagtcacaaatttgcactttttgctggtgattgcactgtctcaaatgtcccctgagcacagtgctgatgtgctgtctggcatccccaaacacaagaaggctgccatgtggctttggagaaatgataaaatacgtgtgtgagatcagcttcctccaggtgcgagttacggtgctgttggcctcgagttctgtgcgaatgagtcagtagtatattaaataaggtgtctctaaaacaaaatgcacataaaacaaggtgacgaggctgggtgcagtggctcacacctgtaatctcagcactttgggaggccgaggcgggtggatcatctgaggtcaggaattcaagaccagcctggccaacatggcgaaaccccatctctactaaaaatacaaaaattagccgggtgtggtggtgtgcaccagtaatcccagctacttgggagggtgaggcaggagaatcgcttgaagttgggaggtggaggttgcagtgagccgatatggcaccactgcactccagcctgggtgacaagaatgagactccgtctcaaaaaaaaaaacaaggtgacttattgatcggttggtgaaaatgtgaccagaggtggtggtacacacccgtggtctcagccactctgggggctgaggcaggaggatcacttgagcccaagaggtcaaggctgcagtgagctatgatcgtgccactgcatacctgcctgggcaacagagcaagaccccattcaaaataattttttaagaaagaacatgaccagtgcaagtcacaagaatcgactatactttatatttcctcccttttgcacatagatagcagtaagccacacacagcattgtttgtttgcctcctgtttttcactcattgtggtagaagtctttccatatcactgtagaccttcttcattcatttccctaagtccttttaaattctacttgcattgttttacaaaatacacaacgtaagcagacactgtttaagtatcatagcgatagggcaagcctcagatataataaactcaaccggaattcaccgatctgttcacatatttcaaggcctgcccagtgtcaaagatggattcttttttttttttttgagatggagtcttgctgtgttgctcaggctggtctcaaactcctgggctcaagtgatcctcccgcctcggcctcccagagtgctgggattacaggtgtgagctatcacgcccatcccacaagtagattttaagctgaggggtggtgatataatttgccttaagctttttaagttacatgtttaaggggccagttaagaccacacatcggggtccagagccacacgtgacctctgtccttgcgtccccagccatgctgcggatggtctcagcagttctccagtttggcaacattgccttgaagagagaacggaacaccgatcaagccaccatgcctgacaacacaggtactgcccccggcctgcctgcccacgacctccagcccccgcccaggtggtgcccagccctcctgcacccctgtcccacgtagagagcatcccccttccagccacacctgtctccaacccaggatcactctgatttcctgcattttttttttttttttttttttgagatggagtctcgctctgtcacccaggctggagtgcagtggcgtgatctcagctcactgcaagctccgcctcccgggttcacaccattctcctgcctcagcctcctgagtagctgggactacaggcgcccgccaccacgcccggctaattgtttgtatttttagtagagacggagtgtcaccgtgttaaccaggatggtctcgatctcatgacctcgtgatctgcccacctcggcctcccaaagtgctgggattacaggcctgagccaccgtgcctggccgatttcctgctttttgctgagtctttgccaaaataacatcaaccactcttttcctgattctaaaagcgtgagctctgctgaaagtgaaccgcaccagcacgacagtggggaacagcaggagcccatcctcccagaccccctctccccacagggagccaccattagcatttggcgtagcttctccagcctctgcactctgcagagacacacttctttttgcctttcaagaacagaattatagtcaatatcccttactttaaaccaaaatagaaatagctatgtctctttattattataaaataatacaagctggaagggggaaaaatctggcatgacagaaaagtagaaaggaagagagaaaattacccataatcacctgtaatcccagcactttgggaggccaaggcaggcagatcacttgaggccatgagttcgagaccagcctggccaacatgacaaaacttcttctctactaaaaatacaaaaattaactgggaatggtgatgggtgcctgtagtcccagctgctcaggaggctgaggcaggagaattgcttgaacccaggaggcggaggttgcagttgagccgagattgtgccgctgcactccagcctgggcaacggagcaagaatctgtctccaaaaaaaaaaaagaagaagaaagaaagaaaaagaagaagaaagaaagaaaaagaaaaagaaagacaattacccataatcatattcccagagataattgctgctcacattttgggatgtgtctctctgggctttgttctgtgtctgtatcactgtggatatagagtgtcacagaaatggaatcgtgcttcaccccctcttcccctggagacagcaagagctttctgtcctgattatgaaatccgatgggctcatttctgaaagctgcacagcacagaaaataggaggacaggatgtattaccccactatgctgctggtaacagcattacctgaggcacctgggggctctgtacataggcacccagcaggtgtgccgtgcacacacatttactcatttgttttacaaaactggagtcagaccctgcaaactgttttgaaacctgcttttttttcccctgaatgctttcgggataacttttcaggttattcacaagaaactctactgggatcccttccctccctccctccctccctccctccctccttccctccctccttccttccttcttttagatagaactgtactgggattccctcgctccctccctcccttcctcctgccctccctccttccttcttttagatagaactctactgggattccccccctccctccctccctcccttcctttcttccttccttccttccttccctccttccttccttccttccatctttcctcttttaaatgaagtctcgcccagactggagtgcagtggcaccatctcagctcactgcaacctctacctcctgggttcaagcgattctccctgcctcagcctcccaagtatctgggattacaggcacgcaccaccatgtcgggctaatttttgtatttttagtacagacggggtttcaccatgttggccaggttggtctcaaactcctgacctcaggtgatccgcccaccttggcctcccgaagggcctccctgggattacgggcgtgagccaccgtgccccgcctccagtgtagcttttagtgactgcagaacattctttcaaatgggccaggcacctgtaatcccagctactcaggagctgaggcaggagaatcacttgaaccagggaggcggaggttgtagtgagctgagattgcatcactgcactccagtctgggtgataagagccaaactctgtctcaaacaaaacaaaacaaaacaaacaaaaaaaccatcagaacattctttcaaatgaatgaagcccgacccatctaaccaattcccgcttcttgggcactgaggttgtttcctagctttctccgattataaacaacactgcgctgaacatccttgtggcacggtctttgctcacatgcagggttattttgccagtgctggttcctggaaaaaaaatagttgggcagagaatgtacacacttttgggactcgtaatgcctctcctgggaaaggcggggcccgtcttctgctcccccaacagtgtgggaaacggtaccctctcccttgctgggcagcaagcacctcttcccagtgctgatggaatcttggtgcctctcgccctcagctgcacagaagctctgccgcctcttgggactgggggtgacggatttctcccgagccttgctcacccctcgcatcaaagttggccgagactatgtgcagaaagcccagactaaggaacaggtaggcggggctggcggtgggcaggcacagaaagagccgcgcaccccggccctgggtctttaaacagtgtatgctgtttttcccaccactcaacagacttttgctgagtgcccgctccgttaccgatcctggtctaggtgccaggcgtaaaagcagtcatcgaaacaaataaccaggccctcagggacctcaagttatagtaaggaaatggataataaaagttcaacaggatgtgtctgggagtggtggctcacacctgtaatcccagcactttgggaggccaaggtgggaggattgcttgagcccgggagtttgaggctgcagcgagctgtaattgcgccactgcactccagcctgggtgacagactgagactctgtctctaaaaaaattaaaaaatttaataataatttaaaaaaacaggatgtaaatgcaacatggtatcctagaaaaacaaaaaacaaaaacccaggatgcttttagatggtgagagcacctgtgaaggggaggttttgttggtcaggaaagtcctctctaaggaagctctaaggatgaaacattcgagatgagacctagatggttcgaggcagacggaaccgcaagtgtaaaggccctgggggtggagcaggcttggggagttgggaacattaagcaggtcagtgaggccgggtgtgggggctcatgcctgtaatcccagctctttgggaggctgaggcggacagattgagctcaggagttcaagatcagcctgggcaacatggtgaatctccgtctctactaaaatacaaaaattagctgggtatgtggcacacgcctgtagtcccagctacttgggaggctgagacacgaggatcacttgaacctaggaggcagaggttgcagtgagctgagagcacgccactgcacttcagcctgggtgacagagcgagactctgtctcaaaaaaaaaaaaaaaaagaaaagaaaaaaagaaaattgaaggaggtcaggtcagtgaggctgaagagcaagggagagagggtgggtgaatccacagtcagaaatgtcagcaaggggcagatcatgcagggtcttaggggccacagtaaggaggtgagttttattcaaactacataggaggccattgaggttttaagccagggagtgacttgattcagtttgtctttcatagaaagatccccttggctgctgcatggagaattgggttcagggatgcaggtagaggcggggagacctaaggaggctgcatccagagtcttggcaatcgtgggagctcacaccatgagcagggagggtggagtggagcgaccacaggccagggagggtttcagaatccagcttttgggcagaggcctctgctggccccaggctgggcagtgaggtacctggatgaagaccccgtgggggagatgaggagtctgggagccacactgacccgggttcaatctcagctggggtactgttgttagttcccattttacagaggagaaaactgaggcacagagaggtttattcacatgcctgaaatcacacagcccctaagtggcagagctgggattcaaacccaagttgtccggctccagagtccacgctcttaaccgctgtgcggtagaaactgctttgagggggtgagggaaggattcaagggctaacacatccgagcccgtcatgtagtacctggtgcgcagtaggacttcaggaatgtctgcctgttgttcatggcattgttcttgatggtacttacactcaaggagctgggaggcgaccttaagggggacgagctgggggcccttccccggttcacccccgacgtctttcagtctgctgatgtgcaggctgcgcccttaccatgagccctgtcccacaggctgacttcgcgctggaggccctggccaaggccacctacgagcgcctcttccgctggctggttctgcgcctcaaccgggccttggaccgcagcccccgccaaggcgcctccttcctgggcatcctggacatcgcgggctttgagatcttccaggtccacccttgtgctgggagggggatgccaacttcctcactccggtcctggtcctttctgaagccctgggtctctccccttctccctggtctctgtccccctctctctctctgagtctctgttcccccctctctctggtctctgtccccctctctctgggtctctgtcccctgtctctgggtctctgtccccttctctctctgggtctctgtcccctgtctctgggtctctgtccccctctctctctgggtctctgtcctctctctctgcatctctgtcccctgtctctgggtctctgcctctctgtctctgggtctctgtcccctgtctctggctctgtcccctgtctctgggtctctgtccccctctctctgggtctctgtccccctctctctgggtctctgtcccctctcgatgcatctctgtcccctgtctctgggtctctgtcccctgtctctgggtctctgtccctctccatcctcccagctcacgtgtcctgcgtccctgcagctgaactccttcgagcagctctgcatcaactacaccaacgagaagctgcagcagctcttcaaccacaccatgttcgtgctggagcaggaggagtaccagcgtgagggcatcccctggaccttcctcgactttggcctcgacctgcagccctgcatcgacctcatcgagcggccggtgagccccaggcccctcccagcccacactcacggttcagatccgtctctcccagcatctgcgagaccagggtctagctcctcctctgctgggcctcaggatgccccatgggttctgtggggaaggtgacagcacctgcttcctcgatcttttgtgaccataggtgattagggcccagaatgtgcctgccacagggcccggctcaaatcaatcggttaatcagagctctcaccgtaactgttgttctcacgtttgttttttgtttgtttgttttgttttgttttgtttttttcttgagacggagtctcgctctatcgcccaggctggagtgcagcggcgcgatctctgcttactgcaagcttcgccccctgggttcacgccattctcctgcctcagcctcccgagtagctgggactacaggtgcccgccaccacgcccggctaattttttgtatttttagtagagtcgggggtttcactgtgttagccaggatggtctcgatctcctgacctcgtgatctacccgcctcggcctcccaaagtgctgggattacaggcgtgagccaccgtgcctggcatctcacgtttgtttttatgtccaagtgtgacttataagagctaaaaatcagcagccacctgagtgtccaatatgtggggatctgacttactctccccctgctgtcaatggccaggccaacccccctggactcctggccctgctggatgaggagtgctggttcccgaaggccacagacaagtcgtttgtggagaaggtagcccaggagcagggcggccaccccaagttccagcggccgaggcacctgcgggatcaggccgacttcagtgttctccactacgcgggcaaggtaggggctggggccggccttggggcatgtgggagtggggatcaagggatctccactggctacagatggggggagggtgcagagggaaaacagggtcctcctgaggtccagacaaacagagcaggggctaggagagcccagggaggagcaaggattctgtctgatgggatcaccaaaaacttcctcaaagaggtgatatttgcagtgggttttgagggatgggtaggagttcatcaggaggcgatctatgtgcattttatccacttattcagcagatatgtgcggggtgccatttgtgtgcccagctcggggccgagcaaagctggatacacagatcaaacatggtttctgtcctcacaaagatccctatctgggagggaggcaaatacagacgatcaggatataaggttaataggtctttcagtggaggcagctgagggtagtgtcagagcccagaagagaagtacctgggaaagcttcacagaagagaatatgctcaatctcaaatctcagtcaagggccggcaaacattttctgtaaagggtccgatagtaaatagtttcagctttgtgggccagacgatctctgtcacagctacacaattctgctgtggtcacacaaaaagagccacagataatacataagtatcttcaagcccccagggaaaaagaaaggaaaaacagactgagaaacagtttcgagggctctcttgcccccagaagggcccccatgagtttgactatgaagacataaatgaaggttctattcctatatatatatacacatatatatatacacacatatatatatacacacatatatatatacacactacacacacacacacacacacacacacacacacacacacacacacacacatatatatatgtatttttttttatttgagacagagtctccctctgttacccaggctggagtgcagtggcacgatctcggctcactgcaatctccgcctcctaggttcaagcaattcttctgcctcagcctccccagtagctgggattacaggcacctgccaccatgcctggctaatttttgtatttttagtagagacagggtttcaccatgttggccaggctgctctcgaactcctgacctcagttgatccacccgcataggcctcccaaagtgctgggattacaggtgtgagccaccgcgcccagccctattccagtgaaagtatttgcaaaaagaggtggcaggctggattttgcctgtgagccatagtttgctgacccctggttttgatgatgtggaccaggcagccccagaggatgggtgaagggtgggaagggctctccaggcagagggaacagcatagacaatggctgggaggcaggagattccatgtgttctgtgtctagccctcagtttcttccccagacatactccagaactccccctgtacccagccctctgctaggccgtgagtcagacctgggccctgccctcgggggaccgctgtctggtggggggcacatatgcagagaattgtagcggccaagatcgtgactctatggagccccacagcaaagccctgagtacccagaaggagccagtggtgtgaaacccacagagacagaaccccaggtggcaggaaccgcaggggtaaaaccccgaggtgggagtaagctcgcatgtttgaggaacagtgcggaggccagggtggctggagcggaatgaataggaagaaagtggtggtggtggaggtcacagaggtggcagggggcatagaggggaaggagagagaggggaccatgctggtggggtgcagttcagaatatggacacaaggtggcaccagtgctcgcttgtccatggtgagctccagacctgggagtctcagagcttctggaaggctccttaggaaatccagagaatgtctgagcctgcaagtcatcgccctcctctacctgacttcattcaggtcgactacaaggccaacgagtggctgatgaaaaacatggaccctctgaatgacaacgtcgcagccttgctccaccagagcacagaccggctgacggcagagatctggaaagacggtgaggacccacttcccccaccccggctctaggggtctgtgcggccattctccaaatccacagcgtgagcacctttgtttcagaggcggaggtctgaacctgagttttctgctcagacccagaatagccagtgtcacaaatagtatttcaaatcagtgatggatggatccatagattaattgattgactattgatttgattgataagccagcatccttctcaaggataaagcactccgccttaatcagaaacgtggcaaagatacccactaacactactgttaaacatcgtttttttagcaatactagcctatgcaatcagaccagaaaaagtatgaatatcgaacaggaagaagtaaacttattatttttagatggcctgtgttccctaaacaattaggagatttggctgggcatggtggctcacacctgtaatcccagcacttttgggaggccaaggtgggcggatcacttgaggtcaggagttcaagaccagcctggccaacatggtgaaaccctgtctctactaaaagtacaacaattagccagatgtcctggtgcatgcctgtagtctcagctactagggaggctgaggcaggagaatcgcttgaatctgggaggtagaggtttcagtgagccaagattgtgtcactgcaatccagcctgggtgacagtgtgagactctgtcccaaaaaaaaaaaaaaaattctactgagaaataatttataacaataagagaacacagaatgatgatcttttgcaggtcagtcaacttttaggctttgctttctttgttttcttacaaagttcccttcacgcccccagggaagaagaaagaaaaaacagactgagatacagttttggagggctttcctgcccccaaaaggcccccatgagtgtgactgtctttttggattgacacttctaggggtcataggcagagatgccaaatgccctgtggtaggactctgaccttttccaagccttttctgccactgcccctgcccccccatccttagaggaggtttgagaaatggttttagaaagctggcagaactggcatcctgttttttccaggttccaagtttctggcatttgtcagtttgccttaatcttttattgacatgaaaaggtagctgtagaaataccagtccatgcaatttggcaagaaaacaaaatgagcggccaggcgcggtggctcacgcctgtaatcccagcactttgggaggccaaggtggacgggtcacctgaggtcgggagtttgagaccagcctgaccaacatggagaaacctcatctctactaaaaatacaaaattagctgggcgtggtggcacatgcctgtaatcccagctactcggggggctgaggcaggggaatcgcttgaacccgggaggtggaggttgtggtgagccgagatcgtgccattgcactccagcctgggcaacaagagtgaaactctgtctcaaaaaaaaaaaaaaaggaaaaaaaaagaaaacaaaatgagcaaggtgagtggttcccaaaacacactcacagagcaaaacagcatggagggtcttgatcttgtgagctcatgctagaaagatagattttatttttatgtctcatatagtatttacacaaggagattggaaagcagagtttgatgttcaggaacagaaccagattatgctacgagaatcatctcccggctgaaaatctgctgcccttttaaaatatttgtgctgtcttcataaacacatgattctccacagtgagccctcatttgtcacactctgtgtgtgcctgactctcagagggttccaaaagaaaaagtggaagctgcaaaacctcctggctcagcctcccgagtagctggggagctgccataatgtcacttcctccataatcctcctaaacaaagctagtcacaaggtcttcccagattcaaggagctgcaagacacaggcaaagggtgtcaatacaggggaaagtggggaatcggggccatttttgcccaatctctgctagagctgctttgagcccagaattggatgcccagcatcctgacagcccagggaaaaacggaaatgagattagctctcctctgagaggcaaaaacaacaagtggcctgggagcatcaagttcattcttgagcttcctggcagccagagcaaaaagggcaacctactaaaacagacacaacctctagagggagagattttttattctttgcactgaattcttacagaggacattcgtccttttggccaacagtgtgtggatacaaagatgaacaggagttcagaagtttatggccaacattctggttttccatcttgctttgctctgtactgttgactaataaccctctcctctttttcttcctgccacctcctctccttcccctcttttcatgcatctctctccgccatctctctgccatctcccctccacccacccacacatctgtcctcactccccagaacatgggggcttccagcagttctctttccttggctccttcccaccgtcgcccccaggatctgcagagaggtgcagctctgctatttctccgccagggggtgggtgtctctgtgcatcgatgggtgaggcttgctggaggaggagggtggacctgttgggctggggacctggttttgaacatctgtcccctctcctcttactgtggaggtctctcactcttcctttccctccttgttggctcccttggaagtttccagactctgtagcagcagaaccccttcttctaactaaactgcatgtaaaagtacaaacaagcgtgatagtaccagctcgcgtttcttgagcacttactatgtgccgttcaccatgtgaaacccctttagaattatcaacaccccattacacaaatgaggaaactaaagcacagagaagttaagtaacttgctgaggtcacacagccagtaagtggcagagctgggatttgaacccaggacatcagattccagaactttagttcttatctgtgctatgaggacttaataaatgataattatcattttgaaaatgacagggagtacggggtaggggagacggttgaacctggggaagaaaataacatatttgagcccctgccatgacctggccctgccctaagcacagattatctagttgacggttgatggcgcttgaatgggatgagttttgcaggacatcagattctgccctagctgtgggttcctgaggaacctggcatgattcaacacatagaatttgggaccaggtgcattggctcacccctataatcccagcgctttgggaggccgaggtgagaggatcacttgaggacaagagtttgagattagcctgagcaacacaggaagaccccgtctctacaaaataaatttaaaaattggtgggcatggtggtgtgcgcctgtagtccaaactacttgggaggctgaggtaggaagatcacttgagcctaggaggttgaggctgcagtgagctgtgatcactccactgtactccagcctgggtgacagtgagactgtgtctcagaaaacaaacaaacaacagaattcgagacagtgccaatagaaggaatggatatttttcactacccaaagcagcaccgccaagcggcactagagaaaatagaatctttttgttgagacagagtctagctctgttgctcaggctggagtgcagtgacacaatcttggctcacggcaacctctgcctcccaggttcaagtaattctcctgcctcagccttccaagtagctgggattacaggcatgtgccaccacacctggcttaattttttgtatttttagtagagatggggtttcaccatgttggccaggctggcctcgaactcctgaccttaggtgatccacccgccttggcctcccaaagtgctgagattacaggcatgagccaccgcaccctgccaagaaaatagaacctctatgaaattaggctcttctggaaaaatggttaaaatagagacagtttgccctatttcaaatattgcatataatgcaagaatttattacatcttttaatatgtttcagattcctaaaatgcaactgcagtggttatgttatcactgttttctctctctatgcctcagtttccaaatctgtaaaatgggaatgattcttacaggcttataaagccattgatgtaaattgctttgagcaatgcctgccagagtatctatgctaggtaagcatttgctgttattgtcatcatttattgataaggaaaacagagatcatgtccttgaagagaagaagggtcaaagaccagagtttgagaggactcctactgtctgagttctaatctcggatcttcagtttctaagctgtgtgaccttaagcacattctcccactcttcagagcctcagtatgtccatctgtccaatgaagctgatatctaccttacaggctgtgtgaggtccttcatatgtaaagtgccagttgtgataaatgataagacccttgacctttggcccaggtccctaaaactgaccctgacctccttctctctctctctgcatctccatctgacagtggagggcatcgtggggctggaacaggtgagcagcctgggcgacggcccaccaggtggccgcccccgtcggggtatgttccggacagtgggacagctctacaaggagtccctgagccgcctcatggccacactcagcaacaccaaccccagttttgtccgctgcattgtccccaaccacgagaagagggtgagtgactcagcctggggaggaaggggtggctgtggctgtgggttaaggtttggcctctggacttggctggagccacatctgattcgaggaccctcaaattagctgtgtggctttgagcaaattgcttctattcctaggctcagggtccggttgggaaaattcatgcattcatatgacttaatgtattaagcatctactgtgctgggaacaggtactggggaggcattggagagaaaggcacagccaactcctgttctcagggagctcacagtctgatggggagcatagacattcatctaaccatccaaaatgaacgtccagttaaatctgtaggggtggtgagtatcacacagggcttgatctggtcagtgaagttagggaaggttccctgggggacgtgatgactgagccctgaaggatacgtgatattccaggcagagaagagtttgtacaaaggcccaatggtaggttggagcacgcgaggtacaagggatagaggaaggccatcagggctgggcttgttgcatgggtgtgacaagaccatggccagcctcactggccactgattttcatgttgagaaaatcagagaatgggccctacagagaagggtcaatgggaatggaaaacaacatgtttgccatgttgcccaggctgctctcgaactcctgagctcaagcgatccacccgccttggcctcccaaagtgctgggattacaggcgtgagccaccacgcccagcctgagatcccatattttatcaaatctaagccatgtattcctccccactagcgtctctgaagtcgagatgtagcttagtcaacggcctgtcagggtttaattaccagtctttttcctttcttggtggcatatttaacgacagcgtgtgccactggaatttttgtactgtttagatttttgccatttgtgcattactgttgaaaagagaaaaggcggcctggcacggtggctcatgcctgtaatcccagcactttgggaggctgaggtgggaggactgcttgagcccaggagttcaagaccagcctgggcaatggcgaaacgccgtctctactcaaaatacaaaaattagctgggcatagtggtgtgcacctataatcccagctactcaggaggctgaggcaggagaagctcttgaacctgggaggcggaggttgcagtgagctgagatcatgccattgcactccagcctgggcaacagagcaagactctgtctcaaaaaaaaaaaaaaaaaaaaaaacgaacaaacaaacaaacaaaaaccaaaaaaacatgatttaccagctttggacagacatcagcttcccaggaggccttttggcgactctcttgcgtgcaaattcagccccacccacatccctccctgcggatcttttctccttagcacttagtatttcttctttattagtgactgcttcacctagggtatttctagtttctcctactgaactctcagttccccagggcaggatttccccctggtttgagcattgctgtcttcccagggcctagaaccgttcctaggcacctagtaggtgctcagtaaattacatgtggaaacaggaaattgccaagcttgaccgtttggcgcccccgtgtggccgccgctgacccccgcgtgtccgtccgctctccccaggccgggaagctggagccacggctggtgctggaccagcttcgctgcaacggggtcctggagggcatccgcatctgtcgccagggcttccccaaccgcatcctcttccaggagttccggcagcggtgagctagagcgagggcccaggcccggcggaggggctgggtgggacccgggtctggaagccgacacacctgcattcaggtctccacccactcttgttccttctgcgctggggaagttgaggcagattactcactttgctgagcctcagtttactcgtctgtgtatgggagaacaatagcccacttgatgcactcctgagagaaagcacacagagtctatggggatctggggtacattgctgctgctgtttagggcagtaggccccaaactatgaacgtgaaatcactgcatggtgttacaaatctgcatgtctttaaaaatgaagtagaaggcggggcgcggtggctcacgcctgtaatcccagcactttgggaggccgaggcagacagatcacctgaggtcggaagttcgagaccagcctgaccaacgtggagaaaccccatctctactaaaaatacaaaattagccgggtgtggtagcacatgcctgtaatcccagctactcgggaggctgaggcaggagaatcacttgaaccgggaagggggaggttgcagtgagccgagattgcgccattgcactccagcctgggcaacaagagcaaaactctgtctcaaaaaaataaataagtaaataaagaagtagaataggacagaatagaaaataccaaggcctaatgagcaagtaatacagcaaatgtaacaaaaatgatgcttcacacaagctgtgtagagcagcaccgtcccttagaagtagaatgggaagccttgtacacaattgaacattttctaatagctacacttttacaagtgaaaaaaatgaaattaattttaacaagatattttactaaagccaatacatccaaaatactggccaatactggctgggcactgtggctcatgcctgtaaccccagcactttgggaggccgaggcgggtggatcacttcaggtcaggagttcaagacagcctggccatcatggagaaaccccatctctactaaaaatacaaaaattagctgggcatggtggcacatgcctgaatcccagctacctggtaggctgaggcaagagaatcgcttgaacctgggaggcggaggtcgcagtgaggcaagatctgaccactgcactccagcctgggcgacagagcgagactctgtctcaaaaaacaaacaaaacaaaaaactgaaacagtcgatcattgtcgatgttgctgtccttggtggtggcgtgaatgctcagatgtgagttttgtgactgtccttgttattgtcactgttgttcctgctgtgtgtcactctgagcccagtgcctggcccgcagcaggcactaggtgagcgtttgctgtaactctctcctccccacccctccctgctcattgcagatacgagatcctgacacccaatgccatccccaagggcttcatggatgggaagcaggcctgtgaaaagatggtgagtggggcagagcctggaatgcgtgtgtgcgtgtgtgtgtgtgcgtgcatgagtgtgcgtgcatgtgtgtgtgcatgcatatgtgtgcatgcgtgtgtgtgcaagtgtgtgtgcatgcacgtgtgtgcgtgtgtgtgtgcatgcatatgtgtgcatgcgtgtgtgtgcatgtgtgtgtgtgcatgcgtttgtgtgcaggggcccaggtggtcggggagtggggctgggatctccccttcattgaccttcctcattacctctccctatcaccgcccccacccccgcttcctcatcatcccctatcacccccctccccgtcaccccatcaccccctccccatcaccactcccccatcgccccctccctataactcttctcccctatcaccctcctccacatcaccccctcccccatcaccccctctccccaatcaccaccccctcccaatcactgcccctcctcaccacccccccatcatcccctgccccatcacccccttcctataactcccctcccctatcactcttcacatcaccccctcccctatcactctcctcatcaccccctccccatcacttctcccccatcacctccctcccccatcaccccctcccccattaccccctctccccaatcaccaccccttccctatcactccccctcctcgccaccccctcccccattactccccctcctcaccacccccactcccccatcaccccctctccgtcatcacccctctcccacccctcacagatccaggcgctggaactggaccccaacctctaccgcgtgggacagagcaagatcttcttccgggctggggtcctggcccagctggaagaggagcgagacctgaaggtcaccgacatcatcgtctccttccaggcagctgcccggggatacctggctcgcaggtgggcagccacgctgtctcccggggtcctgttggccgagactgggtcagggaggggttgaccagatggctctaggtgtcagggcctccaggatgggtgcagggctgaggagcaggtggatggaggtgccgggtgtccaggcttcttggttctgcagtccctgaggggccctgtgggcagggcaggccctgttcagagtaagactggcaacacagaggctggacttagccgcagggtgaccagctgtcctagtgggcctgggtctgggtttcccagggtgcaggacttccagtgctaaaacagagaaagcccggggcaacccaggtcaagctgtccgctctccctggccagtccctcgaggggctccagtctggaggtgagacttccatgggcatagagtcccagtcccgggtgagacctgctttgatgggggccatagaggtgcagcaaggaggccctgctgcaggccatgactcccccaggccacaccggacaagcaggtggatgaaggaaaatgggaaaggtgatcagggcaggagcaagcttgtgcaaagacccaacgatgcaagatcctggcacgcttcaggaatacagggagtttgcgggagagtctccttcctccttagaagtggctcagagaggccgggcacggtggctcacacctgtaatcccagcacattgggaggccaaggcgggcggatcacttgaggtcaggagttcgagacaagcctggccaacatggtgaaaccccatctctactaaaaatacaaaaattagccgtaatcccagctactcaggaggccaaggcaggagaatggcttgaactcgggaagcagagactgcagtgagccaagatcatgtcactgcactccagcctgggtggcagagtgagactctgtatcaaaaaaaaaaaaaaagctgaaagaatagagtggcaggaaaggatggcccaaacaccaggctgagtggggccttgtccagaggagctagggagccatggagggctgtgagcaggggaggggtgggtcagctctgggtgtagaaagactctctggaggcgtgttgggatgggctgataggagaggctggagaaggaggccaggcagaggatccaggcaagggagggtggggcctgaactgcggctggggctttgggactgggcagagagagtcgggagcagggggacgaacggccagaacacagtgagatctcaaagtaataagagtgcctgcacacagtaggcattttatgatggctgactaagtgaaaggagcttggcttggtcaggcatggtggcccacccctgtaatctcagcactttgggaggccgaggtgagtagatcacttgaggtggggagttggagagcagcccggccaacatggcaaaaccccatctctactaaaaatacaaaaattagccgagtgttgtggcacgcacctgtaatcctagctacttgggaggtgaggcaggagaattgcttgaacctgggaggtggaggttgcagtgagcccagatcatgccattgcactccagcctaggcaacagagcaagactctgtctcagaaaaacaaacaaacaaacaaagaaaataaataagaaaggagcttggctctcttgctaaggggatggcgcctggaggctcccactctgcccctcacccatttccccacccagggccttccagaagcgccagcagcagcagagcgccctgagggtgatgcagcggaactgcgcggcctacctcaagctgagacactggcagtggtggcggctgtttaccaaggtgagggcagcctggggaggtggccccagtagggagaggatagggccttggggcttggtctgcttgacaagtgacttcctccatgtgggcctcagttttctgcatcactaaaatggggccagtcggcccaggctttgctagctgggattctttagttagcaagcaacaagaaaaatctgactcgaaccaacatggatcaaagattcaagacaatgtgggctgcacctggatccaggggtccccaagacttctgttcaaggatttgctggaaggactcacagaacttagaaaagctgctgtactcacagctacagtttatcacaatacaaagatacagattgaaaacagcaaaggtgctgggtgctgtggctcacacctgtaatcccagcagtgtgagaggccgaggcgggcggatcacttgagatcaggagttcgagaccagcctggccaatatggggaaatcctgtctctactaaagatacaaaaattagctgggcatggtggcaggtgcctgtagtcccagctacttgggaggctgaggcaggagaatcactcaaacctaggaggtggaggttgcagtgagccaagatagtgtcactacatgtagcctgggcaatacagcaaaactctgtctcaaaaaaaaaaaaaaaaaaaaagagcaaaggttaaaaaaaaaaaaaaagtacataagtgtctcggagagaccaagcatgagcctacagctgctctctcccagtgaagttctgtggacaacacttagctgttcccagcaatgaagtatgataatatgcacggagtattgccaaccagggaagctcacctgagccttgatgtccagcgtttttcctggggctggtcacacaggcatggacaaggtcacacacatggtgacctcagttactcagtctccagcccctccagagtcaaactgatgccatgtggcccagggcccccaccacagatcccatcgttagcatagactatccagggtggcccaaggccccaggtaaaccaagacactcttatcagatgggacattctaaggacttagaggtaacctcccaggagcccatcaagggccagacttttcttaggaatgtgtggggtttggacaacccaggtctgctgagttaaccctttactgcacaagggtccaaacagtgacgtcagtatgcagtgttctgcgtctcccgcttggctttcctccgtgatgatcaccaacagaggctttccacacaggggccaccagcagatggagtcttgcccctaacaaccttggccagcctggtctctcttatcatagagctccagccagattcccaggtttcatgctcattggcccagctggagtcatgtgaccatcccagagccagttagtagggatcagatgagccaggctggcatcacatgcctacccaaagcagagggtgccaagccaggtcgccatgcaccatggagctcagggactaggtgttcccccagggggaaattggaaaggaatgagaaggatggaggttttgggggcagtaatgtaattctgaatacgatgtctgagagatcagcctgcattcccttggtcagtgttaactgagcacctactatgtgcccagaacttttatagaggctggggtaaatggtgattaaaaagagacaaggtcctgccaccatggagctcacagtctgggacaagagttgctgcactgcggcctgtgggccagatggctgtttttgcaaaagccctttcgttagcatggtgtctgcagctgcatctgagctacagcagctgagtggagtaggtaaacagccagaagctgaggttaggggctcacacctgtaatcccagcacttcgggaggccaaggcaggagcatcacttgagcccaagagttcaagaccagcctgggcaacaaagtgagaccctcatctctacaaaaaaaaaaaaaacaaaaacaaaaactgggtgtagtggtgcacacctgtagtcccagctacttgggacgaaggattgcttaagcccaggagtatgaggctacagtaagccatgatcgcatcactgcactacagcttgggtgacaagagtgagaccctgtcttgaaaaaataaatcaaaattaaaaactggccaggcacggaggcgtatgcctgtaatcccagcagtttgggaggctgaggcaggtggatcacttcaggtcaggggtttgagcccagcctggccaatatgatggaaccctgtcactactaaaaatacaaaaattagctggatgtggtgtcaggcacctgtaatcccagctactcaggaggctgaggcaggtgaatcgcttgaacttggaaggtgaaggttgcagtgagccaagatcgcaccactgcactccagcctgggtgacagagtgagactctgtctcaaaataaataaataaataaaaataaaaattaataataaataaaaaacagccagggtggcctgtaaaatctcaaatatttcctgcctggcccttgaagaaaaagtttgcctaccttaggtgttgggggttggggtcaagtaggatttgattggcatcatttgagaaatgtgaatgatacctgcgaaagatgcaaggagtcggggcagaaaaggagagaatagaagggatacagaattgggtggagaggaaaagaatcaagtagacttgtgtagaacggagtagaatatgattgaacagaaattatcagagcagatctcacttagcaagggcgacgaggttttgtgaaatttttgtttcagttctgtgtgtacctctgtcactgcagcctgaatcatgccatgtaaagctcatctctcactaaggaccttggactaacaggcttaagaaacactggcctttggccaggcatggtggctcatgcctatatcccaacactttgggaggctgaggtgggtggattacttgaggccgggagttggagaccagcctggccaacatagcgaaaccctctctactgaaagcacaaaaattagccggacgtggtggcatacgcctgtaatcccagctactcgggaggctgaggcaggagaatcgcttgaacctgggaggcagaggttgcagtgagccgagatcccaccactgcactccagcctgggcgagagagcaagactctgtcgaaaggaaggaaggaagggaggaaaaaaggaaggaaggaaggactgttccacagaatagcagcagccacagtacacagtgtctcttggatgtggaaggatcctttagccagagagattagatagatcaatagtgtatttagtggtgcttgcctgtacctgtcagtgttctaggcctgtgaccagggactgttgccaaggcggggacacacagctaataggtggaggagaagggatttgaacccagaaactcaaaccccactaagagtgtgaggtcttggcgcctgaagtcagccattccacccctttcacctccacctaggtgaagccactgctgcaggtgacgcggcaggatgaggtgctgcaggcacgggcccaggagctgcagaaagtgcaggagctacagcagcagagcgcccgcgaagttggggagctccagggccgagtggcacaggtgagggggcgggggcagggcgtgggggcgtgtcttcggggtggggctgtgtcgcatgggtggagccaggtgtgaggggcggggcttccggctgagccagcctgtgcccaggcagggctgtcgggaggatgggagcaaagctaaggtgtactgaggccgggcggggattggggctgtttagtttggttgagtcgtgacgtacagggagcagggccctgggggtgtagccagggtatgggccgggtaggggtggggtgggagagtcctgcagagccagaatggagctgggctgtaggatctgggggcaggggcctcagctgtggccgggctatggtatgcaggtggcgaacttataactgtttccagtatttcagctatcttaaaataatgctagaacatttgggaggctgacgcgggcagatcacctgaggtcaggagttcaagaccactctggccaacatggtgaaaccccgtctctactaaaaatgcaaaaattagccgggtgtgatggcgcacgcctgtaatcccagctactctgggaggtggaggttgcagtgagccgagatggcgccaccgcactccagcctggtcggcagagtgagactctgtctcaaaaataataataataataataataatgctagaacaaaccccttcttgagcatttttctgtttgccttttctgcattatttcctgtggttacattttaggtatgaaatgtattaaatgaaatgtgaggtagtagaaagacccctcgggggttatttgaaggatggactggaaggggaaaggctagagtctgggaggctggggaggaggctggagagagacaggtgagagaaggaaagacctgagcctgttggggctgtagggacagagaggaggggccagagagagcaggggtgcagactgatggctgtgagaggtgagggagggcatccccaggattctgacttagtgattagggggatgtgggctcatcctgagatggggacctgagggggaggaggtggggacaccgtgtcctcctgcccctcagtcctgccctggagaacttaaaggccaaagcaagttacaaggcagtaggcacccagtgcaggttgccctgggagcactgcctgctgaccactaacctcccacacactccccagctggaagaggagcgcgcccgcctggcagagcaattgcgagcagaggcagaactgtgtgcagaggccgaggagacgcgggggaggctggcagcccgcaagcaggagctggagctggtggtgtcagagctggaggctcgcgtgggcgaggaggaggagtgcagccgtcaaatgcaaaccgagaagaagaggctgcagcagcacatacaggtctggccccttgcatgcccaccaggccaccctccagacccctctgtctacaccatccacctttgcttctacaaaccgtgtgtctttgggccatgaatttgtagaaaactcagttctaagtgaatttgcaaaaagaatacatttttgattcagatcgcgggagaccttaaaatgtgtgagcttcacctatggatggatccaggcatccaagtgatatgttcagcttcaggcctggctggatccaggtgtctgagtgatttcctcagcttcaggcatggctggatgcaggaatccaagtgatatcctcagcttcaggcatggctggatccaggcgcctaagtgatgtcctcagcttcaggcatggctggatccaggcatccaagtgatatcctcagcttcaggcatggctggatccaggtgcccaagtgatgtccttagcttcaggcatggctggatccaggcattcaggcaatgttctcagtactccccctctctccgtctcctggctgcattcacgggcaggctgccctcatggttccccttcaaaatctagtgtgtattttacactacagcacatctcaattcagatgctaaattttcattggaaatacttgatctgtatttctatttcataatttctgcagtttataaaaactagattcacatggccaagttgttccaaacatgcttaaaagcttttcagtgattgggtgtctggttttaaatttaaaataaataaaattaaataagacagaaaatttagttcatcagtccacatcagccacatttcaaaagctcagtaatgtttttttgttttttgtttttttgagtcagagtcttgctctgtcgcccaggctggagtgcagtggcaccatctcagctcactgcaacctccgtctcccgggctcaagcaattctcctgcctcagcctctacagcagtatctgggattacaggtgtgtgccaccatgcccagctaatgtttttttatttttagtagagacagggtttcagtatgttggccaggctggtctcgaactcctgacctcaggtgatccgcccacctcagccttccaaggtgctgggattacaggcgtgagccaccatgcccggcccagtagtgttttaatcaacttctcttgatccctttggtgagggagggaccctaccctaggtttatggggatggctgagcacacagcactgggcaccagacaggtgaggggggccgacatcacaccacagacggccacatggatgttgccctcaagagcagagtgaacaagcaggggctgtgggaaacaggctttgtcacaacaacaggtggaggtgacccctgggtgccgtgggaaaatgtgtttggtttgtttcagtaattccatgggctggcagggagctggaatgtgcttctcagggataagcaggcactgtgcctggtccccaggataaggagggtccccagataaggctgggggaccttatctatgggagcagagggagtaggaggacttctgtttaggccatttgaggcccctgctacttttagcaaatgtcaaggcagcacataaaattgagtcttggctaggtgcagtggctcaatgtgtaatcccggcactttgggaggatctcttaagcccagaggttcaagaccagcctaggcaatgaagtgaaaccctttctctacaaaaacaaaaacacaaaaattagccaggcatggtgtcacacacctgtggtgttgtcacactacccacgaggcctgaggtgggaggatcacctgagcccaggaggtcaaggctgcagtgagctgtgatggcaccactgcactccagcctggatgacagagtgagacctttctcaaacagaataaaataggctgggcgcaatggctcactcctgtaatcccaatactttgggaggccgaggttggtggatcacctgaagttaggagttcaaggccagtctggccaacatggtgaaaccccatctctactaaaaatacaaaaaattagccaggtgtggtagcgggtgcctgtaatcccagctactcgagaggctgaggcaggaaagtcacttgaaccccgggaggtggagattgcagtgagccaagactgcaccattgcactccagcctgggcaacaagagcaaaactccgtctcaaaaaaaaaaaaaaaagaaaagaaaaaaatttaaacagaataaaataaaataaattcaaaaaataaaattgagtcttgatttccagtgtgcccaatgactgtcatgttggcagtacccatttctataatttgtgtatttactatgtttattttatttttaaaattatttattatttatttattttttttttgagacagagtctcactctgttgcccaggctggagtgcagtggcgcgatttcagctcactgcaagctctgcctcctgggttcacgccattctcctgcctcagcctccagagtagctgggactacaggcacccgccaccacgcccggctaattttttgtatttttagtagagatggggtttcaccgtgttagccaggatggtctcgatctgctgacctcgtgatccgcctgccttggcctcccaaagtcctgggattacaggcgtgagccactgcgcctgacctatttactatgtttatagtttataatctgtacccctaacccccacacaagaatgtgatttccacaaggataggtgttccttttttttttcagaggcaagatctcgctctgttacccagacttcagtgcagtggtgcggtcatctctcactgcagaaggacagtcacttttacccatcctcagtgcctagaaccgtgcctggcatacactaggcactcaataaatgcttgttgcgctaatgaatgaaatgggaaagccaataagagtttgatccttcccggcctcacccagggcatggacatctctgaaccacaagccgcggggatccgtgggccagccatccccgctcccatccttccccatcacactccatctattggcccagtatcctcactcctcctgccttcccaccccaggagctagaggcccaccttgaggctgaggagggtgcgcggcagaagctgcagctggagaaggtgacgacagaggcaaaaatgaagaaatttgaagaggacctgctgctcctggaagaccagaattccaagctgagcaaggttgggggcctgagggcagctgggaaagtggggatggggtgcattggtgggttaatgaatggtgaacttcacgccatgggggttaccacactgcggttctcaggtgtgcaccggtgggggtgggatgggtctatagccccaagggaatgggaaggagagggaggtgtagggggaggaaggtcagagaagggtgaaaaggagcagaaacatagatgagaacaacaccagaagctgcagatcaggtaagggctgctcctggcccaactcctcctgactgccccccatcccactccacccctcaggagcggaagctgctggaagatcgtctggccgagttctcatcccaggcagctgaggaggaggagaaggtcaagagcctcaataagctacggctcaaatatgaggccacaatcgcagacatggagggtgagctcccgcccagccagtaggggtctgtgtgtgctctaatgggggacctcaggcaagccccatgtgctacagggcctcagtggctgtgtctgctaaatgggataggaaggaaggctcagggcagattgagtgtcctcccagctcttgagttcttaatgcatctctaaatccaactctctttctctccttggtgtcttgggttgtcctcctttcttcccatctgactgtcccactgtctgtctgtttcagacatgtttttgtctccctgtcccttcctgttgacttagaatcagaaacagaagggaaggggcacagggaggaggcagggctgtagacacagggcagagagagtcagagggtggaggcatgggctgttggtggggatgaggaggagaggacagtgcgtctaggacaacattgtgggaagagtccctgagatagatggggaaggtgggaggaggagaaggcgttaagggaggtgctgagcttagccttatatgtgactggggacctgtggtctctgtgagagcggctgagtgtgcaggcctggagtcctcatgcacggcccccacccctgcctccagaccgcctacggaaggaggagaagggtcgccaggagctggagaagctgaagcggaggctggatggggagagctcagagctgcaggagcagatggtggagcagcaacagcgggcagaggagctgcgggcccagctgggccggaaggaggaggagctgcaggctgccctggccaggtgcagggtggggtgggcttggtggggtaagcagcatgggtgcacggccagccagcgtggggtgcccaagtcagaagctcctgggtacaaaccccagtggagccactcaccagccacagacaggccacatcccctccgagcctcagtgtccccttctgtcaaatgaagatagcaagagttccaggcccactaggttaagggaaaagtgaaacaagactctatgtgtctggtaacttgcataacagtgcacaatgggaacaagaaaatgctatttctaggccaagtacgatggctcacacctgtaatcccagtactttgggaggccaaggcaggtggatcacttgaggtcaggagtttgaaaccagcctggctaacatggcaaaaccctgtctctactaaaaatacaaaagttagctgggtgtggtggcgggcgcctgtaatcccagctactcaggagacttaagcacgagaattgcttgaacccaggaggcagaggttgcagtgagccgagatcacaccactgcactctagcctgggcaacagagcaagactatgtctcaaaaaaaaaaaaaaaaaaaaaaaaaagagctatttcttcctcttccctgcttggcctccccacaccaaacagcccagaatcagctgagatttgccaagtggcctatgttaggaatcataataattatatttacactcgttcacagtaattgagctcctactgtatgccaaatgtggtgcttagtgtttcaaatgctttttatgcactgtgcttcatgcaatctaagacccacttgattacaagtacagctccatttcggagatgttaaaatgtgaaaaactgtgcatcttagagttgatggaacatggggggtgtgtgtgtgtgtgtgtgtgtgtgtgtgtggttaagaacacgtctttgttttgttttgaaacggagtcttgccctgtttcccaggctggagtgcaatggtgtgatttcggctcactgcaacctctgcctcccaggttcaagcaattcttgtacttcagcctcccaagtagctgggattacaggtgcccgccaacaagctaattttcgtatttttagtagagacgggctttcaccatgttgcccaggctggtctggaactcccaacctcaggtgatccattcgctgaggttaggattataggcgtgaggcactgcacccggccgtgaacacacatctttgagtctgacttctgggttggaatcctggcttctcccctttctagtcatgtgacctcatgcaaatcacatcacctctctagcctcagttttttcatctataaaatggggtaattgtagacagtactcctaaggttagtgtgagggttaaagaagaaagtgctcctcagacacttcgcataccctgagccctcaataaatgccggatgtttctgttactactttattactcttgttaatttttttcttttttactgaggtgaaattcacataaaagtaaccattttttaaatgtacaattcagtagattttgcccattcacaatgctgtgtaaccatcacctctatctagttctagaacattttctcttttattgagctggagtcttgccctgtcgcccaggctggagtgcagtggcatgatcttgcctcactacatcctccgcctcttgggttcaagcaattctcctgcctcagcctcccgagtggctgggactacaggtgcccaccaccacacccagctaatttttgtatttttagcagagacggggtttcactatgttggccaggctggtctcaaactcctgacctcaggtgatccacctgccttggcctcccaaagtgctgggattacaggcatgagccactgtgctggcctccagaacttttttatcacccccaaaaggaaaccctgtatgtattaaccaatcacagccaggcacagtgactcacgccataatccagcactctgagagtaggaggcaggagggtcgcctgagcccaggaattcaagaccagcctgggcaatataatgagaccctgtctctacaaaaaacttttaaaaattagccaagcatggtggcatgtgcctgtagtctcagctacttagaggactgaggtgggaggatcctttgaacctgggaagtcgaggctgcagtgagctatgattgtgccactgcactctggtctaggtgacagaacgagaccctctctctcaaaaaaaaaaaaaaaaagaaagcagccactccccatccctccttctccccagcctggcagcctctgatccactttctgtctaaatagaatttgcctattctagatatttcatacaacatgtggccttttgtgctttagttatttttatcgccatctccccagcaaccctggtaaaggggagtgttcatcgtcatgtcctcccacaaatcaggaccctgcccttcttaagtcacttgttggagcagggggccaggagaggatactaagccaggcctgtgtggctcctgaaccattaacccccaggtcccagttggtgctgcccccagatccagcttctctttgcaatgacgctgtgtgaagggacaggaagccacatccctgtgagagctgtaaggagggactccgggccaacccagccactcacggacccggtaacctcggcaagtgctttctccacgctagacctcagtttcctcatttggcaggaacattaaatgaggtgatacaagtaaagcactggcatgaggcaggaacttactaagtgtctcctacgattactgttgctgtcattcccactttacagctaagaaaactgaggttcgaaatgagtcaggctgggcgaagtggctcactcctgcaatcccagcactttgtaaggccgaggtgggaggatgacttgaggccaggagttcgagaccagccctaggcaacataggcagaccttgtctctttggggaaaaaagattagccaggcatagtggaccgcacctgtggtctcagctacacgggatgctgtggtaggaggatcacttgagcccaggaatttgaggctgcagtgagccgtgactgcaccactgcactccagcatgggcagcagagcgagaccctgtctcagaaaacttaaattagtactgcagccaagtgcccagtggcagagagaggattctaacctgggactggccactcccaaagcccacatccagcctctcagtccccagaaatcattgcctcactctggcctgcccctgtatcaactccacggttcttgtcacccccagggcagaagacgagggtggggcccgggcccagctgctgaaatccctgcgggaggctcaagcagccctggccgaggcccaggaggacctggagtctgagcgtgtggccaggaccaaggcggagaagcagcgccgggacctgggcgaggagctggaggcgctgcggggcgagctggaggacacgctggactccaccaacgcacagcaggagctccggtgaggcccggtggcaggccgctgtcacagcctgtgcacatacagggctgggggaaggacttaggtacaaagtctctgtctatacagaggcttacttattgtacagttgttcatgaaccaccggctctaggtccggcctgggtcaagctggggacagagatgggtcagacccaggtgttacccttgggaacttccagtctcaggggaggcagattcaggcaaagacaatctcaacccagaacaaggggtgctttagcggagtaacacggggcactgtgggtgataagtgaagacccctaaaccaagtctatgggagatccaggaagactttcctgaggaagggccttttggaaaagggttttgaaaggtgaataggagttcacccttaaagccacactccttccacagcatcaccacccagatctcctgaggagcataacatgaggccctcatattttaaggaaacatgaaaaggagaaacaaccagctcccccaaagcccctgccttcctctgctctgaaattcccatcctctctcctttcccccaataaaggtccaagagggaacaggaggtgacggagctgaagaagactctggaggaggagactcgcatccacgaggcggcagtgcaggagctgaggcagcgccacggccaggccctgggggagctggcggagcagctggagcaggcccggagggtgggttggggcagggggacagggcaggggggccacggggagggcagggcaggacgcggggttggaggaggtaccgctggctggttctaggctagctcatctccctgggcccctttcctcacgcattcatgtgcatctttcattcagcaagcattaatggggtgtggactatgttccaggagcattgctggggaaccagccatgaacccaacaaccagcactgccttcccttgtggagctttccttttagtgagagaggcagagggtaaacaatataaacactttcagtttatattggggtgataagtgctatggggccataatgaacaggaaaaagggatcagaattctaaggcgggtgagtttttaagtagagaggctgtggaggtattctgcgagaaggtgacatcagggtaaaaaactgagggagtggccgggcatggtggctcttgcctgtaactttgggaggctgaggcaggcagatcacttgaggccaggagttcgagaccagcctgggcaacatggtgaaaccccatctctactaaaaatacaaaaactagctgggcgtggtggcacacacgcctatagtcccagctacttgagaggctgaggcaggagaatcacttgaacccaagaagcagaggttgaagtgagtcaagattgtaccattccactccagcctgggtgacagagcaagactctgtctcaaaaaacaaacaaacaaacaaaaatgggccagacgtggtggctcatggctgtaatcccagcactgtgggaggctgaggtgggtggatcacctgaggtcaggagttcaagaccagcctggccaacatggcaaaatcccatctctactaaaaacacaaaaaattagccgggcgtggtggtgggcgcctgtaatcctagctacttgggaggctgagacaggagaatcacttgaacctgggaggcggaggttgcagtgagcagagatcgtgcctttgcactccagcttgggcaacaagactgaagcactgtctcaaaaaaaaaaaaaaaattgggagtgaggggtgagctatttgttcactgggagaagtgtgttccaggcagagggaacagccagtgcaaaggccctgagatgggagtgtgcctggcctggtccaggaaaggcctcatagatctttgctcatctccttcccacaccagggcaaaggtgcatgggagaagacccggctggccctggaggccgaggtgtccgagctgcgggcagaactgagcagcctgcagactgcacgtcaggagggtgagcagcggaggcgccgcctggagttacagctgcaggaggtgcagggccgggctggtgatggggagagggcacgagcggaggctgctgagaagctgcagcgagcccaggtaagtggggtgggcagggcagaggtttctgctgtgtgaccttggtgacatgcctgccctctctgggcttctatttggtccatatcaaaccaattgtctcgtttggctcttccaacataatcatgtacaagtctgggcacagtggctcatgtctgtaattctagcacttgggaggccaaggcaggaggattgcttgagcccaggagttcgagaccagcctgggcaacatagtgagaccccatcttcagaaaaaaaaaaattttaattagccaggtatgctggcatgtgcctgtagtcccagctactcaggggactgaggaaggaggatcccttgagcctgggaggtcgaggctgcaatgagctgtgattgtgccactgcactctagcctgggcaacaaagtgagatcctgtctcaaaataataataataatacccagtactttgggaggccgaggcgggcagatcacctgaagtcagaagttcgagaccggcctcaccaacatggagaaaccctgtctctactaaaaaaaaaaaaaaaaaaacacaaaattagccgggcgtgatggcgcatgcctgtaatcccagctactcgagaggctgaggcaggagaatcacttgaacccgggaggcagaggttgtgatgagctgagaccgcgccattgcgttccagcctgggcagcgagagtgaaactccatctccaataataataataataattcactcatttaagatgtgcaattcaatggattttggtatattcacagagtggtatggccatcaccataatctaattttggaccattttcattatcccaaaaagaaaatcctataccctttagctatcatcccccacttctcccccaccccacccagggaaccactaatctcctttctgtctttactgatctcccattctggagatcttatataaatggaatcctactatatatgggtggcctttgtggctgccttcttttacttaacataacggtttcaagattcatctgtgttgcagctcgtagcataattccttttttattttttaatttttaaaacaccagctgggtgcagtggctcatgcctgtaatcccagcactttggcagcggaggcgggtgggtcacctgaggtcaggagttcaagaccagctgcctgaccaacatggtgaaacttcgtctctactaaaaatacaaaattagccgggtgtggtggcgcatgcctgtaatcctagctacttgggaggctaaggcaggagaatcacttgcacctgggaggcggaggttgcagtgagccgagattgcaccattgcgctctagcctgggcaacaagagtgaaactctgtctcaaaaaaaccccaaaaaacaacagcacgcaatagatccatatacctttctattgccgaataatgcccgttgtatggatattccacatttgtttatccattcgtttattgatggacattggggctgttcccgcctcttggcgatggtgagtaatgccactgagaacattccggtacgagtttctgcatagacctatgcgttcatttcttttgggtatgcacctaggagcgggattgttgggtcatgtgggaaccctatgtttaagcatctgtggatctgccagactgttttccacggcagctgtaacatttcacattcctgccagtgtggtagagagttgaggcagatggggtcactgggtggaagccacgattggagggcttcattcccgtcccttccctgcaggctgaactggagaatgtgtctggggcgctgaacgaggctgagtccaaaaccatccgtcttagcaaggagctgagcagcacagaagcccagctgcacgatgcccaggtgaccctgcctgcccttcggctccaccgtcaccctcccctccttgtcctcccagccacacctgacattgccgtctcctccatctacaggagctgctgcaggaggagaccagggcgaaattggccttggggtcccgggtgcgagccatggaggctgaggcagccgggctgcgtgagcagctggaggaggaggcagctgccagggaacgggcgggccgtgaactgcagactgcccaggcccaggtgagcagccctacgtaagaccttcagggaggcacagcccccctcactgctcctcctgggttccccagctcagggatggccatgctgcccaccttctcataggccagacccatgggtgcctttctcatctctgactcccccttaccccccacagcccatgcccagccctggctgtcctgacccctgactctcagcctcatcccttgtcccagctccagctcagccccagctccagtgccgtcctctcccatctagatcctcctcttggcctctgggcctccagcctctcccctaacagctcatcccctgcacagccccagaagcttctttctttacctggagctgaccctgtccctcctctgctcacagctctcccacgcctccccagtactcctagacaaagtccatgcctctcagtcaggcattgaggccctgcaatctctggtccttcctctgcctttagctgtattcatctctatctctactttcctattttatttgaaaaaaaccttttatttttccagacttagcattaggctcccctgtgggaagtttcctgacccgtcttctctttctcctctgtcccaactccagtcaccttgggctgggactgtctctgcccatgagtctccccaccagactgagagccccttcaaactagaatcccatcagagttagatccaggtctgtagcacagcctgatatagggcctgatgtatggtaggcgttgagaaatgcctattgaatgaatgagtgatggtacgtgcctgcagatatccttcaactggcagacttctatgcatacttcaagacccatctcaaatgctcctccttcaggaagtttctcctgaatgttctaaacagattctgggcacttcctgtggacctccatagctcccatactgctaccttaacccctatcaccctggctgtgactctgtgtctcccccagcagccgaggggctccccaggaaagactccaggtctgattcacctctgcatcttggagggagtaattttaattccctggaagaactagggctcatagtattcacaacttcacaccactcagaggcagaagagcccagcagaatgacccctttccctcttcaggcctcagtctcttcatcctggaaatggagcaccaccagcttacaccttggtcactcatggccgtgaccaccaaccaccctctctctcctcccctcagctttccgagtggcggcggcgccaggaggaggaggcaggggcactggaggcaggggaggaggcacggcgccgggcagcccgggaggccgaggccctgacccagcgcctggcagaaaagacagagaccgtggatcggctggagcggggccgccgccggctgcagcaggagctggacgacgccaccatggacctggagcagcagcggcagcttgtgagcaccctggagaagaagcagcgcaagtttgaccaggtggggcacctcagttcacccagccggggaatcagcaagtccatctacgcttcccatggtcgttgtgaggaaccagtaatccgtgctgtcacggctcaactaggcagttgtagtggaccaggaagcaagacccttctttgctctgggcctctgtaaaataggacatccctctgtcctgattcatgcctcttgccacagcataattcctcgtagcacccacttttactttcagagctgccctggtttttggatgacaaaatatacgaataccttcagtaccccagagattgcttatgagaattaaatcaaataactcatctcacttctgctgattcacggggtacctcaggcaagttgctttttccatctcagcttcagttcgcccatctggaaaatggcaataataccaagcatctggcagcctgaggatgaaataaaaatcacagaaccttagagagttcagatcaggcaatcctgaggttcagatcccaattcggcctcttgatggctgtgtggcttgggcaaattgctcaacctctctgtgctttattttattcatttagaaaatgcagtgtgaagctgggcactgtggctcatgcctgtaatcccagcactttgggaggccaaggcgggcggattgcctgagctcaggagttcacaaccagcatgggcaacacggtgaaaccccgtctctactaaaatacaaaaaaattagctgggcatggcggtgtgcgcctgtaatcctagctactcgggaggctgaggcaggagaatcacttgaactggaaaggcggaggttgcagtgagccaagatcgtgccactgcactccggcctgggtgatagagcaagactccatctcaaaaaaaaaataaaaaattaaaaaaaatttttttaaattgtcatttccctgtaggtggtgcagtatgtttttctagctgacttacgatttctctctttatgtttggttcttagtggtttgactgtgatatgcccagctgtgggttttttgtatttatcctgctttagattcactgtgcttcctgtagctgtgggttgatgtttttgatcaaatgtggaacatttcagccattatttcttcaaatatttttatctcccactctctctccttccccttcttcttggactccaaatacatatgatttgattgtaatactcttccacaggtcattgaagctttattatttttggcatcttctggaattttatataaattattttcacataaatctcttttgggatgggcttattttactcaaaataattttttttttttgagacagagtctcgctgtgtcaccaaggctagagtgcagtggcacgatctcagctcactgcaacctccacctctcaggttcaagcgattctcgtgcctcagcctcccaagtagctgggattacaggtgtgcaccaccatgcctggctaatttttgtgtttttaatagagacgaggtttcaccattttggcaaggctggtctcgaactcctggcttcaagtgatccacccacctcggcctcccgaagtgctgggattataggagtaagctaccgcacccagcctcaaaataattagtctgagatccatccatatttttgcatatcaataatgtattccatgtatcaataatgtatttttgctgctgaatattattcctgtggtatagatcagccacattttgatattcattaaccttttgatgaacatttgggtttttttccagtttttttctagttatggataaaaccttagtctttctcaaaggtggttttaattaacatttccctaatgaccagtgacgttgagcatcttttcatatgcttatttgccatccatatatcttatttgctgaagcttctgttcagatcttttgcctatttgttaattaatgttgtttgttttactattattgaattttgaaaattctttatgggccgggcacggtggctcatgcctggtaatcccagcactttgggaggccaaggcaggcagatcacctgaggttgggagtttgagaccagcctgaccaacatggagaaaccccgtctctactaaaaatacaaaattaggtaggcatggtggtgcatgcctgtaatcccagctacttgggaggctgaggcaggagaatcgcttgaatctgggaggcggaggttgtggtgagccgagatcatgccattgcactccagcctgggcaacaagagtgaaactctgtctcaaaaaaacaaaacaaaaaacaaaaaaaaaacaaaaaaaaagaaagaagttatttatgtattctaaatgcaagttctttatcagatatatgctttgcaaatatttttgtccagtctgtggcttttctttccattctgttagagtctttcaaagaacagaagtttttaattttgtccaatttatcaatttgttgttttatagattgtgcttttagtattgtatataagaaatttttgcctaactcaaggtcacaaaggttttatcctggtttttttcttgttttctttttgtttgtttgtttgttttgttttttgagacggagtcttgcactgttgcccgggctggagtgcagtggcatgatcttggcttactgcaacctctgcctcctggggtcaagcgattcctcctgtctcagcctaccaagtagctgggattacaggcacatgccgccacacccggctaatttttttatttttattttttttttattttttatttttagtaaagacagggtttcactatgttggccaggctagtctcaaactcctgaccttgtgatccacctgcctcggcctcccaaagcactgggattacaggcatgagccactgcacccggcctatcctgttttttttttctggaagtcttccagtttcaagtttacatttaggtctgtgatttattctgagttaatttttacatatgatgctatcatggctccatgttaatttttgtgaatataaatatccaagtattccaacactgctctccactgacttgtttttgcatatctattgaaagtcatttttcttcttcttcttctcctccttctttttcttcttcttcttctttttttttttttttttgcccaggctggagtgcagtggcgtgatcttggcttgctgcaacttctgcttcccgggttcaagcaattctcccacctcagcctcccgagtggcttggattacaggtgtgcgccaccacacctggctaatttttgtatttttagtagagatggggtttcaccatgttggccaggtggtcttgaactcctgacttcaggcgatctgcctgcctcagcctcccaatatgctggaattacaagcataagccactgcaccagccttttcttcttatttgaagttattttgcctcttctagttcctttgcatttccgtatgtattttagaatcagtttgtcaatttctaccccaaaacaaaaagccttccaatttggaactgtgttgaatctatacaacggttttggaagaactgacatcataacaatattgagttttctcaccgaggaagagggtatatacgtccattgaaataccttagaaatgttttttagttttcaatgtacatctttcacatctgctgccagatgtatttctaagtatttcatggttttatggctattttaagtgatgttgctttcatttccatttttgattgctagtatatagaaacaatagatttttgtatattgatcttgtatcctacaatcttggctaaactcacttactagtgctaatatagtttttatatatttcattggattttctacatagatgatcatgttttctgtgaacaaaggcagttttacttctttctttaccttttctttacccttctaggactccaaatgcttgtatgtatgactgcttggtacttttttcaggttgttaaagttccattaatttctgttacaatcttctttctttttctttctttgctctgtttggataatttatattgacctgctttcaagtttactgattctcctgatgtgtccagtctgctactaatttcatccagtgacttttttatttcagatatttcatttttcagttctggcatttctatgtggttctattttacagtttcaaatccctcctcaaataactgcctcttcacccattgtatctgtctcgttctgaaacttatcatgaagtccttgtgtgcacgttctaatatgtaggtcatctgtgggtctatttgtatggactgatttttctcttaactatgagttctgttctcttttcttttttgcatgttttataagtttatttgccaattactgtgtcttaaaaaaaaacagtaaaggttgaagtacatttaaaaatatatatatgtgtattttttctactgccactcttaagaggaaggaatgccctttcttctgttgaacatatagagttagggactgatcagtttgatccattcaagagttaagctggtttgggacacggttgcaactttaatccctctacctccctcttgtgtctctgcctttgtctgtctctttctctctctttctctgttcctggctgctccctcttcccgttcccttgtacactcctttcagctaatctatttccccctaccccatctccctcaaactggaagcttctggcagaggagaaggcagctgtacttcgggcagtggaggaacgtgagcgggccgaggcagagggccgggagcgtgaggctcgggccctgtcactgacacgggcactggaggaggagcaggaggcacgtgaggagctggagcggcagaaccgggccctgcgggctgagctggaggcactgctgagcagcaaggatgacgtcggcaagagcgtgagcagggcccccgctccccgggacacactgggtgaggggagacacgtacatgcatgtatgctttcacacatagaacatgaaaaacaaccagccatcaaagtcatatgttcatgcacaaagagaacaagagggctgggcatggtggctcactcctataatcccagcactccagcactttgggaggccaaggtgggcggatcacctgaggtcaggagctcaagaccagcctggccaatgtggtgaaaccctgtctctactaaaaatacaaaaattagccaggcatggtggcacatgcctgtaaccccagctacttgggaggctgaagcaggagaatcgcttgaattcaggagggagaggtttcagtgagccgagatcattccactgcactccagcctgggtgacagagcgagactgtctcaaaaaaaaaagagaacaagagggggactgttcagcaaacatttgcatccatatagacacacacagcgtgaagagaatctccaccaaacactgtgctaatgcacacgcatagaaagtaaggagagccattcaccagaggcaggtcttcatgtagacattcacagaacgtgaggagaatcttccatccagcacatgtgttcacacacagaatacaagagctgctcacaaagcacacatgctcacatttgtgtacacgggatgtaaggagaatcttctattacttgtttttgtttgttttttgttttgttttatttttgagatagggtcttgctctgttgcccaggctggagggcagtggtgcaatcatggcacattgcaacctcagtctcctaggctcaagcagtcctcctgcctcagtctcccgagtagcagagactacaggtgcattccaccatacctggctgttttttaaattttttgtggagatggggtcttgctgtgttgcccaggctggtcctgaactcctaggctcaaacaatcctcccacttcagcctccctaagcattgggattacaggcatgagccactgcaccttgctgagaattttccattaaatacacatattcatgtgcatatgtacacatacagcatgagaaaactactcaccacacatatgtatggatgctcagagagagaacacgaagagaatttactacaacacacagcctgagaaccactcccccgacatgactaggtgcatgcatacatacataacacacatacacacacacacacacacagtgtgaggactcccactttgcctgccaccaattccactgagcacacacagactctcccaccaagcctctgtcttcccttaactcgtgtatccctccagggcctgtagggtggtgccccaaggcttctcgcaggctcccctcacccagccagtgtcccagccttccgaatggtcaaaatgacccgccacatcctccactccatccttccttcattcatcctctgaatacatttatggatcacacccagggacacaggccaccctcactaatgatgggaggcactggcagaatttgttgagctcctgaatagatgctgtcttgacatccttatttctttattttcccaacaacgtgcttctaggagtccaatgggtgagggctttatcttctccacgcacttagacgttgatccgattttgcttttagccaggcctggagagaacccctctctccctgacacagacctggcctgcagccctagggataattgagctaaaacccagctcatacttgagccgttaaggtccgtcccttgggaaaaatgtcaggttatttgtagtgactccaaaggcccttgtgggaaacaggatgttgatgggagaaagtttgatcccttcaagtaaacaaaataaattggcaagtaccaaataggaagggaggctagagggcccattccacggaccgaaagtagatactgtcagtgaccagaattgtaatgaacatcatgtgggcagtggcgatccacagacataggccttgctctgtggaactcacagttcagtgcgggaggcgggtgttgcacaaaaagccacctaagcaaatgtcaaatgaccactgtgactagggctaggtaggagaggggccccagtgccaggagcatgggtagcagagaggccctgatgggttaagagaggcttccttgaggaggtgacagttaagtaaggagaggggtgaagggggagtctctgaaaattcataagcccagctctattttcacagcatttgggggtttaattcatacctccctgaaagatcagggaccctcccaaacagaaaacccaatagaagtagatagtgggtcggtgacaccctggggagtctggcaaacaccagcactgatgaccctggagctacgtgccttcaacccattcgcacagaattcccaaagatgaattcccagtgagtgagctcacagtgcaaaattacaaaactcagagggaataatccaccatgagtgagagtcagctgacctaacagacgcttgtattggactctgaagggcttcagataatagaattatgaagcatcagttattcatgaaatacattttggggtgatgctgaatgagacacctaggaaggagccgttcagcagattttgaatggatgaatgaacaaactaggatgggcacactgacttgccatctccccatcctccatcaaatcttcccctactctagctaggctcctaacctcctctgcctcagtgacccaggtacccagcagctactctccccaccaggtgcatgagctggaacgagcctgccgggtagcagaacaggcagccaatgatctgcgagcacaggtgacagaactggaggatgagctgacagcggccgaggatgccaagctgcgtctggaggtgactgtgcaggctctcaagactcagcatgagcgtgacctgcagggccgtgatgaggctggtgaagagaggcggaggcagctggccaagcaggtattgtcacacagaaggccacagggtgccagtccagctggggtatgccatggtgtgtacaggcagcaagaagggcagcaaggggtctccccgacccacccaccactctgtctcctccacccgccgaccactcagtatctccccaacccttccactgctcagtgtctccccacccacctgccactcggtgtctccccacctgcctgccactcagtatttctgccagtctctcgtgccagccaaaccatcttcctcccacaaaaccatcttcctattccccaacccattaacctgccatgacccattaacccacacacatatcctgttgacctgttgctgtacccaatcatacatcctccatccaccacacaaaccattcacccatccatctgccaccccatctattcaactaccctaaccacccacatacagcctctcccccaaccagcgttgtgtccaactactgctccatccacccagtgactcccttccaacccatctcctctccccaacccaacccctcccctatttacccaaccccagcccctcagcaccccctgctgactccacttagtcactgactcactgacctgctcatccgccctcccctccatccacatccttccccaatccagtcagtcatcgctccctcgcttccttgtttgttccattgctctctccctccctgcatcgttcattcattactcgttcagtccaggaacttcccatgtctcccctctactaggtggtgaggggcaggggcagctctgggtgtcagaaagaccccgctggagccatgtaggcaacagacttggggtggagggtgctagaagctggggaggcagggaagagaggtgaacaggtgacctaaggccaggggtctctgcagggttttgtctctgctagcccctttgacttagacatggctgagtgtccaagacttggccctgggggcactggggaaccatgggagggctatgagcaggatcagctctggagacgtgttggaatgggctggaggggagagatgagaggctagaaaggaggcttaggtgagatgggggactgagctggggcagtagggatagagaggagaccaagtaaagagagtcagggagtgagaggagcggggcttgcagcctgggcaggagctccagggcagacatccatgtccctagcacacagagggaggctgggcttcctgtgtctgacccggtccctcctgacctcctctccagctgagagatgcagaggtggagcgggatgaggagcggaagcagcgcactctggccgtggctgcccgcaagaagctggagggagagctggaggagctgaaggctcagatggcctctgccggccagggcaaggaggaggcggtgaagcagcttcgcaagatgcaggtaagagccggcgtgagctgcagggaggggaggctttggtgtcttcaagccccaaccatcactccagggtctaaggctagctcggacccctcgctctcaacccacaggcagcatccgcatgggtcagcacctttataaacatccatgccccagaggctggcttccttcttcttctattttacatttctttcatttaaaatgctgcacttttaagtcaaatttcctcatttttttgtttgtttctttgtttgttcagttggtttttttttttttgagacagtctcattctgtcacccaggctggagtgcagcgacgtgatctcagctcacagcaactctgcctcccaggttcaagcagttctcctgcctcagcctcctgagtagctgggattacaggcgtgcgccataatttttgtatttttagtagagacaaggttttgccatgttggccaggctggtctcgatctcttggcctcaagtgatccacccgcccccatggttttgtttttgaagtgaaaataccatatggttttttggccagacacagtggctcacacctgtaatcccaccactttgggaggccaagatgggcagatcacctgaggtcaggagttcaataccagcctggccaatatggtgaaaccctgtttctactaaaaatacaagaattagccaggcatggtggcacgcacctgtggtctcagctactcaggaggctgaggcaggagaattgcttgaatccgggaggcagtggttgcagtgagttgagatcccaccagtgcactccagcctgggtgacagagcgagactgtctcaaaaaagtaaagatagaaataaaataaataaatcaacagtaggcaaactgaggctcagagaggggcagtggctggctcacagtcacccagcaaggatatggccaagttgtaattcaaacccatgtctatctaacttgaagccaggctccatcaggcttccagctgccttctagttctcagccaggtcaacctcctcccttgaggaccagagtgggagaggctggctcagggtcacacagcaagtggctttatacacaggagcccaggtctgcagggttcggagagttccctgcttgttcacgggagctgaggagccccgtcggtctggcaagggggtggaggagttccctgtgctgtgtggccaggctgagcccatctacctattccgttccacccaggcccagatgaaggagctatggcgggaggtggaggagacacgcacctcccgggaggagatcttctcccagaatcgggaaagtgaaaagcgcctcaagggcctggaggctgaggtgctgcggctgcaggaggtgaggctggggtaggctgggccctgggacaggaagctgggaggtgggcaaggctaaccttgaggtccctggatgtgaagctggggaggtgggcggggctaaccacagggtccctggatgtgaagctggggaggtgggcggggctaaccacagggtccctggatgtgaagctggggaggtgggcggggctaaccacagggtcccagggtgtaaggctcgggaggtgggtgtgtcttaccatgtggcctgcaatgccagcctaagagcagggattttgtcttagggcactagggagccatggaaagatccagaacagaggatgggcagggtcagctctgtagcagttgaactggagtggggagattggagtcacaaaggctgtgggagtgggagtgggagaggggagagagagagagattgagaaagagagagagaaccctgagccagggccaaggggatgcagaggacggagaaggcagtcagaaggcaggagggagaaggctatggtgaggggggccggaggaggggaggagagcactgggggtctggcccggtgattgggggaccctggaggagaggcaggtttgagaggaggacctgtgtgcagtaaaaggtggagagggtgaggggcctgggggttgggctgcaagaggtgagcacaggtcaggggctcaggagacagatttaggagacatctgtaggttgcagctcattccagggttacccagggacagcatgagaaaaaagccaagagccttgaggtgtgagggacagagaaaggggtgagacccgtgcccagattgcttctcctcacacccaccggccacccctccatcatcacaggaactggccgcctcggaccgtgctcggcggcaggcccagcaggaccgggatgagatggcagatgaggtggccaatggtaaccttagcaagtaagtgccccaagggtctgaaggctgaggtactgcgtctgcaggaggtgaagctggggtaggctggaggtggctgggctctgggacaggaaactgggaggtgggcggggttaacctcggggcccctggggtgtgaggctggggagatgcgtggggctaaccacagggtcctgtagtgtgaggcaaggcaccctcctctgaccatcctgtcctttcatccccacgccttcctgtctccctagggcagccattctggaggagaagcgtcagctggaggggcgcctggggcagttggaggaagagctggaggaggagcagagcaactcggagctgctcaatgaccgctaccgcaagctgctcctgcaggtgagcgtgattgaccgcccccaccagcctcagtccccattgacctgggaccgtaaccttcagtcctcttattcaacaaatatagaaaggggatatttgagttgggttttgaaggttgaataggagttcttaaaagggttgaaaggcatgattcacttgtatttctgaggggtttcttcagggctaaatccaaagatgaattatgtggggaaacagacatgggccagcaagtgtgatcatggaagtctcctgggcccagtagagagagagaaaagactttctgcaggagtcataagaaaacatttggaaaaagagacatttggctgggggttttaaagcataagttggagttcagcagagggagaaaagcatgttttcctttgcatatttatttataaatattttctgaggattccggtggcccagatcctattccgggttatgctggggacctggagatggttaatactaagcctctgccctcaaacacgtcttagtctaaaggaggaaatagaccatcccaatacagagatacaagtgaaaatggaggaaacacgggcactgtgggaacctagaagggactaccaacctagcctggaggatagaggccatcagagaaggcttcctggtggaggtgatgccttgagagatcttaaaggaagtgtaagagtttgccaagaagacaacagagtgatgggatttccaaggacaaaccaatgtctgcattcttcattagtttttttctaattttttttttttttttttgaggtggagtctccctctgttgcccaagctggagtgcagtggtgctatctcggctcactgcaacctctgcctcccaggttcaagcgattctcctgattctccaattttctctacaaaatatttaaaaattagccaggtgcagtggtgcatgcctgtagtccaactacctgggaggctgaggagggaggatcgcttcagcctgggagattgaggctgcagtgagctatgattgtgtcactgcactccagcctgggtgactggatgacagagtgagaccctgtctcaaaaaaaaaaggtaataattatatgctcaacagttatgtgtagtaagactactttttaaatggagagaatggggaaaatatgcaaaatgttttaacctactttaattgatggtgatagtattagcactgtttttctgagacattgagtttataatgtgggataaagtaaatgatcaaagatgggatactatgtcatctactacgtccttgacatcagggtactcagcaccaaagaaccttgatatagttgtcctagagaagagattaagtttttttttttttttttttttaaaaacaggccaggtgtggccgggcgcggtggctcacgcctgtaatcccagaactttgggaggccgaggcgggcagatcacgaggtcaggagatcaagaccatcctggctaacacagtgaaaccccgtctctactaaaaatacaaaaaattagccgggcatggtggcatgtacctgtagtcccagctactcgggaggctgaggcaggagaatggcatgaacccgggaggcagagcttgcagtaagccgagatcgcaccactgcactccagcctgggcgacagagcaagactccatctcaaaacaaaaaacaaaaaaacaaaacaaaaaaaacaggccaggtatggtggctcatgcctgtaatctcagcactttgggaggccaaggtggaaggatcgcttgagcccaggtgtttgagaccagcctgggcaacacagtgagaccccatctctacaaaaaatatatgtgaaataaaaagagaaaagaaattacgtttagtggggcgcagtgggtcacgcctggaatcccagcacttttggtggattgcttttagcgtaggagctccagaccagcttggatgacatggcaaaactccatccctacacaaaattgaaaaattagctgggtgtggtggtgcacacctatagtcccagctacccaggaggctgagttgggaggatcacctgagcccagggaggtcgaagctgcagtgagccatgattgcaccactgcactccagcctgggcaacatagtgagaccctgtctcaaaaagaaaagtgataaattatgtttaaaaaatagtttaagccaggcgcagtggctcatgcctataatcctagcactttgggaggctgaggcgggtagatcatgaggtcaggagttcaagaccagcctggccaacatggtgaaaccccgtctctactaaaaatacaaaaactagccaggcgtgatggcgggcacctgtagtccagctactcgggaggctggggcagagaattgcttgaacccaggaggcggaggttgcagtgatctgagatcgtgccactacactccagcctgggtgacagagcgagactttgtctcaaaaaaaaaaaaaaagtttaaaaacaaaactaagcaaacccctgtagttctcaatttgacttcatcatattcacgtgaactggtgatgtattttatacagatccagtctctctgaccacccaaaaggcctagaaacagggaacccagtagcaatgagtatccctatatccacgttgtgatctggaaatgctgtttccctctaaaagaaactggggctggctgggcgcagtggctcacacctgtaatcctagctccttggaaggctaaggcaggaggattgcttgagcccaggagtttgagaccagcctgagcaacccagtaagaccccgtctctacaaaaaaaaaaattagccaggtgcgatggcgggcacgcctgcggccccagctactctgagggctgaggtaggaggattgcctggatccgggaagcagaggttgtagtgagccagaattgtgccactccactccagcctgggcaacagagtgagaccctgtctcaaaaaaaagaaaaagaaaagaagagaaatgaaactggagcttcttccgaagtggctgattccagatctggagcaggcaatgaacaagagtaacccagaacattttgcgatacccattagcaggaaagatagtatagttatgtcaagagcacgtagaagtcaacgtgaagagcctcgcgctggcccaaagtggggcaagttgagcttcaatgaggaaaataattgcaactgatttaatcccttgaaatctgtttaaattcaacagcaacgttttaaaaaaatattaattagttgctgtgttagttccctagggccaccataatgaattaccacaaacacagtagcttaaagcaacaggaatgtattctctctgtttttttttgtttgtttgtttgtttgagatggagtctcgctctgtcacccagactggagtgccgtggtgtgatcttggctcactgcaacctctgcctcccggattcaagtgattctcctgcctcagcctcccaagtagctgggactacaagcatgcaccaccatgcctggctaatatttgtatttttaatagggagggggtttcaccatgttggccaggctgctctcaaactcctgacctcgtgatccgcccgcctcggcctcccaaagtgctgggattacagacgtgagccaccgcgcccggccaggaatgtattctctcgtggtcctggaggccagaggtctgaaatcaaggtgtgggcagggttggttcctcttgttcatgcctctcccctggcttcccgtgggtgctggcagtccctgctgtttcttcatctgtagatgtgtcattgcaatctctgcctttaactttacaaggcattttcccatctttgtggctctgtctcatctcctctttttttttttttttttttttttgagacagagtctcgctcttgtcgcctaggctggagtgcaatgggctgatcttagctcactgcaaccttcacctcccgggttcaagcgattctcctgcctcaacctcccgagtagctggattacaggcgcccaccaccacatctggctaattttttttgtatttttagtagtgatggcatttcaccatgttggccaggctggtctcgaactcctgatgtcaggtgatccgctgcctcagcctcccaaattgctgggattacaggtgtgagccaccattgcctggccctcatctcctcttaaaaggacaccagccgtatcagatttgaggcccaccctaatccagtgtgacctcgcgttaatcaattacaactgcaaagatcctatttccaactaaggtcacattccgaggttctgagtggacatgaattttgcgtgggagtctattcaccccatgggtgcatggggagggcatgggggaggggcatggagcttccgtgccctcctgggagcgccaccctccaggtactgcacatgttcagcttccagaagctgcccaaaccctgtcctcttgggccttttatggagacgtcactggataggtgtgattaacaaccacgtagaaatgtgattggacaaaaagggtccgatctaaacccagcgaggcctgtctgttcagattcttcctggcttctctatgcagcattccttccccctctgaaatgagggtcctgtgatccacagtcaggttagagtttctgccttgtgcaggtgaaagagggggcaggaggaggttagagagagaggttctgtttactctaaaagggctatgcaaattatgatcaaggaaccatggacaaaacccaacacacacacaaacacacacacatacacacacacacacatgcacacatgaagtatatacgcaaagcaatatcacaggtacaaattcccttgaaaattcacaaataaggccaagcgcggtggctcacacctgtaatcccagcactctgggaggccgaggctggcaggagttcaagatcagcctgaccaatatggtgaacccctgtctctactaaaaatacaaaaattagccaggcgtggtggcgggtgcctgtagtcccagctactcagcagggtgaggcagaagaatagcttgaacccaggaggcagaggttacagtgagccgagatcgagccactgcactccagcctaggcaacagagcgagactccatctaaaaaaaaaaaaaagaaaagaaaaaagaaaattcacaaataagacagaaagatcgggtgcagtggctcatgcctgtaatcccagcactttgggaagctgaagcaggtagattgcttgagaccaagagttcaagaccagccaggacaacaaagtgagaccctgtccctaccaaaaacaacaacaacaacaaaactatcagggcatgatggtgtgcacctgtagttccagctagtcaggaggctgaggccggagaatcgcttgagcccaggagtttgatgctgcagtgagctatgattgtgccactgcactccagtttggacaagagtgagaccctgtctccagaaaacaaaaaacaaaaaagaaagaaagaaagaaagaataaagtccctggacacagctgccaatttccaggaaacacagaggagagacaaataaatgctgaattagaccgtaagtgtgtgatcagaaaaatccagacagagaggaactctacaaggctaacaacctacattcttcaacagataaattgtaagaaataggctgggggcagtggctcacatctgtgattccagcactttgggaggccgaggcgggcagatcacctgaggtcaggagtttgagaccagcctgcccaacatggagaaatcccatctctacaaaaaaatacaaaaatgagccggacgtggtggtgtgtgcctgtagtcccacatacttgggaggctgaggccggagaatcacttgatcctgggaggcagaggttgcagtgagctgagattgcaccactgcactccagccttggtgacagagcaagactccatctcaaaaaaaaaaaaaaaaaaaaaaaaattttaaaggaataaaagggatggaggagggaactgcaggttaaaagagacttaaaagacatatatctggccgggcgtgatggctcacgcctataatcctagcagtttgggagaccgaggtgggtggatcacttgaggtcaggagtttgagaccagcctggccaacatggtaaaaccccatctctactaaaaatacaaaaattagccaggtgtggtggtgcgtgcctgtaatcccagctactcaggaggctgaggcaagaaaatcgcttgaccccgggaggcagagattgcagtgagccgagatcgtgccactacactccagcctgggtgacagagtgagactgtgtctcaaaacaaacaaaaacaaacaaacaacaacaacaacaaacccacatacatctacttttttaaatgggtaggattcaactataggatctagggatgcatctgtgtgtaataaaactaaagacatacaaggaaatgaggacctgagaagtcaggataacatgatattttggggagaaggaagaggttttcattaggagtagtgcatgaaagggcttctggaagggcaaagttctctttcttgaccaaggtgctactgacagtgatgtctgccttttgttaactcatgatgcctgtgcgggatgacacccacacacatccatgttcagagacaggaagcagcagggtcatggggctgaaacggttctcatctccagctgctggaataatcaggaacactcccataatgttcttggttgagaattactgtgctaataaaactagcagaatatttattactgattttttttatttgattaatgtttggctctctgtatcaccattttatttcacaataaaaagtttgaggccgggcgtggtggctcacacctgtaatcccagcactttgggaggctgaggtgggtggatcacttgaggtcaggagttcgagaccagcctgaccaacatggagaaaccccatctctacaaaaaatacaaaaattagccagttgtggtggcaggcacctgtaattccagctactcaagaggctgaggcaggagaatcgcttgaacctgggaggcagaggttgcagtgagctgagatcgtgccactgcactccagcctgggcgacagagcaagacatggtttctaaataaataataaaataaaataaaattagcaggggtgatggtgtacgcctgtgatctcatctactcaggaggctgaagtgggaggatcacttaagcttgggagtttgaggctgcagtgagctgggatttcaccagctgggcaacggctgtgctccagcctgggcaacagaacaaaactgtctcaaaaaaagttttttaagttaaaaaaaaaaaaccccacaaaggagaatatgctaattacccagtcattgtgtccctgcgagggtaaaataaagtatgaatcagactgggtctgactcacttccatgtacccagcagaaggcctcgctcagagtacgagctgaataaataaacgggaactattattaggggtgtgtttacacattttccacgtagcagctactgtttattgaggccgtgtttctcaaaatgctcctgcatataacacctgagatgcccgttataagtgcagattcccagactccactttggtattgctgagtcagaatctctgaagggtgagacccagatgtctgcatttttttcccaagctcccccagatgatcctggtgcaaacaaaagtgtgataacccttagaatggactcattcacagtcagaagtagaatttatgacatttaaacaagtttgtgatggtctcgtggacttattaaagtaagcagaaaactatccaaaatgttaagacccagggctggcagtgctgtgggtgacaagtcaataaactattaataaaaatacaagctaacatctgttgagtatttagtatgtttcaggctctgtgctatgcgtgtgacaatcatcagtgcacttaattctcagaggtgcctggatttacctaccaccttccctctgagactccaccatgacatccttccttcccctcctgctacaggtagagtcactgaccacagagctgtcagctgagcgcagtttctcagccaaggcagagagcgggcggcagcagctggaacggcagatccaggagctacggggacgcctgggtgaggaggatgctggggcccgtgcccgccacaagatgaccattgctgcccttgagtctaagttggcccaggctgaggagcagctagagcaagagaccaggtaggtgagagcggaggccacaggagaaaggtgacctccacattctggttggtgagaggaaggaggctgtgttacaaacacgtggtttagaaacatccaaaagacatcatcatagtaatgactgctggcctggcatggtggctcacgcctgtaatcccagcactttgggaggcagaagcgggaggatcccttgaggccaggagttttcagaccagtctgggcaacatagcaagacctcatctctaaaaaaaaaaaaaaaaaaaaaaaagccaggtgtgttagcgtgtgcctgtagtcccagctgctcaagagcctgagataagaagatagcttaagcccaggagtttgaggctgcagtgagctgtgatcacaacactgcactccagcctgagtaacagtggaagaccttgtctctaaaaaaaaaaaaaacagccaggcacagtggctcacacctgtaatcccagcactttgggaggccaaggcgggcagatcatttgaaggcaggagtttgagaccagcctagccaacatggtgaaaccccatctctaccaaaaaacaccaaaattagctgggtgtggtggctcatgcctgtagtcccagttactggggaggctgaggcaggagtattgcttgaactcaggagatagaggttgcagtgagccgagattgcgccactgccctccagcctgggtgacagagccagactccatttaaaaaaaaaaaagaaagaaaaaaagaaaagaaaaagatgccaggcacggtggctcacgcctgtaatcccagcactttgggaggctgaggcgggcagatcacctgaggtcgggagttcgagaccagcctgaccaacatggagaaactgcgtctctactaaaaatacaaaaaattagccgggcgtggtggcacgtgcctgtaatcccagctactcgggaggctgaggcaggagaatcgcttgaacccaggaggcggaggttgtggtgagccaagatcacgccattgcactccagcttagcaacaagagtgaaactccgcctcaaaaagaaaaaaaaagaaaaagaaaaagaaaaaacaaacaaagtgtgtaaatatatgtaaatatttaaatgattgctgattttctgtatcatttaggatgctttgggctgcaagtaactgcagtctcactacgagtattatttacgtaataacgtgccagttagttatagctgaattacaaactactctgaaacttagtggcttaaaacaacaaccatttattattgcttatgagtctttggctagtaagttctgctcatttgggcttggtgggcttcactcatcatccgctcagttgagggtcagctagatggatttgctaatcttggctgggctttcattttttttttcttttttcttttcaagaacagcatgagtggtattggctgggcttgcataactcttaaggctttgcctaggacaactaagctaacttgtctctgctctatgtggcctctcatcctccaggaggctagcccaggattgttcatatgacagagtcaaggttctaagagcaagggaaagtgctaaagactccttgaggcctgcacttggaactggtactgtgtcacttctgccatatcctattaaccaaagcaagtcactcagcccgctcagattcaaaggaatggggaaatagatatgactgtttgataggagcaactgcaaagtcatattgccaagggtatggatacagaaaggggtgagaactgggaccatctgttgtatcagtctagcacaaagaggaatgtctttttttcaagtgataagaagtctagagctaggcagccaaaagatggtagggctctggatcaacatctgtgttgttttttagtcttttcctcatggtcataaaatggctgcaattgcaccaagaaccatacccacagacatccatgttcagagacaggaagcagcagtagtatggggctgaaagagtttccatctccagttgctggaatgaccaagaatgcccccataacattcctagttgagaactgctgtgctaataaaatgaacagaatatttattactaagcctaatacctttcactcttccaatacaatagattttcctattgctcagtactattcagcaacaataattacaacaatactaatagttcctatttattgaggatttactatatatcaggtgttggactacttgtatatacctgtatgataccacataatccctgtgagagaaagaccattgttatcctattttgcatgtagaaaaactgaggctgagatgggctataaatgtaggatacttgacttgctattcatcatctgcacattatctcatggggaggaatgttattatattatacatcaaatttatataaggttcccttttgtattcattcattcaacaaacaaatattaagagtgtactgttggggccaggcatggtggctcacgcctgtaatcccagcactttgggaggccaaggcgggcagatcacttgagatcaggaattcaagaccaacctagccaacctgatgaaaccccgtctctaccaaaaatacaaaaattagccgggagtagtaatggacacctgtaatcccagctactcaggaggctgaggtaggagaatcacttgaacctgggaagtggaggttgcagtgagccgagatcacaccactgcactctagcctgggcaacagagcaagactccgactccaaaaaaagaggagtgtactgtttaccttcccatgtgctggtcactgaaaaaattagacgtaccatggaagtatgtctaattacctccatggtatgtctaataccatgtctggtgggattccccaaggtgaaagactcatgagctggacatggcaatgaaggcctatgaactagaagggttgaagggacacagatgaagaagaagctggaataccctgagatgtagtggtttgggaagggtatctagaggaggaggcacttgagctggagctgacaagaatgggatttccagggcttagagtcccaagtcagttggcagctttgtgggaaagtctgggagacatcagggcatttggaggaggagtgtggttggttctgagagtctgggacccaggagagggatcagggagacagggaggtaaatgaggcttgaagcacacagagccttgaatactgggccacggaactctgttctgtgggcagtggggagccctgggggcaatggggagccatgggaaggctgtgggctggggagggacacggccagctctaggtatagaaagatctctctggggctaaggtgggaatggatcagaggagggagactggaagctgggaggtttggaaggagtctggaatgatggtccaagcagaacaagatgaggcctgagctggggctggggctgtgaagatgaacaagagaggatgaagaagagaaagcagggggcagaaggaatgaagcggaggctatgggtggtggcaggggaagaagacactgtttggagctaaggcctggtgactgagggaatattggctttttggaggaagatgctaaattcgttgtggaacttgatgagagtgaaaggcctcagggacaggcagaaggaaacggccccagaggtgcatgagacaagtggttctcagtccacagggtcacccaggggccccagggcttatgggaactgtagcttgaggtctatggggacccctgctccattatacaaatgaggaaactgaggttccgagggagtagatgagttgcttaaagtcaccctgcaccaggtgcagtggctcatgcctgtaatccccacactttgggaggctgaggcaggaggatcacttgaacccaggagttcaagaccagcctgggcaacatggcgagaccccatctctacaaaaataaaaattaaaaattagcccagcatgatggcacacacctgtagtcctagctactcgggacactgaggtgggaggatcgcttgagcccaggacattgaggctgcagtgagccatgatcacaccattgcactcctgtctgggcaacagagcaaggccctttctcagaagaataataaagtcaccctgggagcaaagaatgaccagatgattcttagctgaagaagtctcagccgggcgcagtggctcacgcctgtaatcccagcactttgggaggccgaggcgggcggatcatctgaggttgggagttcgagaccagcctgaccaacatggagaaaccctgtctctactaaaaatacaaaattagccaggtgtggtggcacatgcctgtaatcccagctgctcgggaggctgaggcaggaacaattgcttgaacccaggatgcagaggttgcggtgagctggagatcgtgcctttgcactccagcctgggcaacaagagtgaaactctgtctcaaaaaaaaagaagtctctctccttcatccttttccactgcttagtgccttcccactcgcccccagccctgtgccttcctctcagcacatctggggctgttgtatccagggtggctgtcaagcaatcccgattgctagaggtcccatcacatggacttcaccccagatgtgatggtccatgcaggagaggacaggtgtaagggcagaaagagtgttccctcccgctctgaagattcaagtctgctgaaataaactgacaataaatagattaacaaaataaaaggctacaaatatattaatgtgcatgaacacaggagccatgcaaaatataagactttttatacagggtcagatggttgaggcttaagtatcctctttataggggagagagacaaaaaggatgtattcaattgtgagagatagtaaatgattttcaggggaaaatgaatgggcccaaagagtaaactgtagtttgtaaatgatcctctttggaaactgaataggaccaaacatatacttattataactcacaacatcataggaaacaggtatgtgaggtgtcctagtagaagccaaggacatggatgccgaggagaaggcagcctgcatgtcagtgtttggcctcagtaaactgtgggaaccacttaggggttaggaaagagggaagaagccaatccaagaacaaggtgacagccactgcatgagtctatggggacaaaatcctaggttgagcccctctactgagactcctcctcatccctctcttcagagagcgcatcctctctggaaagctggtgcgcagagctgagaagcggcttaaagaggtggtgctccaggtggaggaggagcggagggtggctgaccagctccgggaccaggtaagcagctggcatcattagggagcagtggagagtgtgaccactggctgagaaattgcacaggctgtctccagaggcaatgagctcccatcacaagaagcaatgtgcaggtgctggactggaactgaatgcagataccatcttggcacttggcacatcagcagagggttggaatcagtgagtttgcaattcataaatgctggcatctagaaagggccctgtagggagctgaggaagccagggcaagggaagaagttaaaccctacccagaagctagaccaggactagcttctatgtaccaggcactgtgctaaagacataacatttactgtgtttaattcttatcagaatggtagaaggaaggtgctattatttaccctcttatttatgtgaggaaactgaggtacagaaaggtgaagtaacttgctcaaaattatttagctggtaagaggtggggtcagtattcaaacctcagcactctagccccagagtgtgtgttcttgattacttactgagcagttactgtgtcataagcaactgctttttaaaaaatacatatttgcatttcctcactagtcccatttcacagatgaagaaactgaaactttaagaggatatattttgcatcagagtcacagagatagagcctggatcagatcccaggtctgtctggacagagtccctctgcccttaaaagctcagctgtgctttattcgccattcattccacaaacaattattgagcacctgctatgtgccagacactgtggtaggcattagggatatggatgtgaacgaaacagaggaagtccctgccctcatggagctcacattttctgcataggatgagacgtaataaacctgtaaacaagcagataattacagattgtgacaagggctatgaagaaaaaaagtgaagagagaggaagacacagaggattggggaatcctcttcaggttgggagatcaggaagaactctttgagaaggtgacatttaaattgatacctgaagggtgaaaaagagccagtcagagggaacagcaagtataaaggccttgaagaatagaaatacgtttggtgagttcagaacaaaaagcagattagtatggtctagataaacatctgttgttattttagtcctggtctagcttcttggtagagtttaacttcttccctcactttggctgcctcagctccctacaagggcccttcctagatgccagaatttataaattgcgaagtcattgattccaaccctctgctgatgtgccaagtgccaggatggtatctgcactcacttccagtccagcacctgcacgttgcttcttgtgatgggagctcattgactccagaaaatgtgggataggaaggctgaacgataagaaatgaggtcagatcatgtatgttccctccctgaagagagaggtggtagggtctggggaggatctcagtgaagttggtctggacagtgggtttatgggaagagagaactggacaagaaaaagaccctgtggggcctggaatgccaggctgaggggctggaaccttgtcccgggggtactggggagccatgaaaggattgtgagcaggagggtctgggtcagctctgggtataggaagacctttctgaggccatgtaggagacaacctggaggggagagactggaggtcagggtagaggctggcatgagggatttaggagaaaagaacaaggcctaaacagagagcagaggatggggcagagagagtcagggggcagtagggatggggcagtagtgggctgttggagagggagggagtgatgacagtacctggagatataacccagtccccctgcttccatcaagctggagaagggaaaccttcgagtcaagcagctgaagcggcagctggaggaggccgaggaggaggcatcccgggctcaggccggccgccggaggctgcagcgtgagctggaagatgtcacagagtcggccgagtccatgaaccgtgaagtgaccacactgaggaaccggcttcggtatggtcatcccacgtacaggcctgacgggtggggagcaccctaactccataaaccccagggacgcgaggccgtgccaggggcaacaacagggggaaatgggatccacgggggtgtggggctgtgggagcagcggctgtgttgcgggagagccaaatccaggtaacttctttcttcccacacccatttctccctgtcatctctgtgccctcctttcccaccgtgcaccaccacctttctctcctttcctcctctctgtgtgtccttcatctctctctgccccccattgcttctgcccgtctccctccatttctcttgatctcatccctctcttcccccttattttgttctctctcttcctatctctctctctctccccctcatctctctctctcctccccctttctcctcccctcccctcccctcatttcatctctgtatcctggtctctcctccccacagacgcggccccctcaccttcaccacccgcacggtgcgccaggtcttccgactagaggagggcgtggcatccgacgaggaggcagaggaagcacagcctgggtctgggccatccccggagcctgaggggtccccaccagcccacccccagtgaccctaccctgtccccagatgcactaacagatggggcccagcccccttcctccctggaccccacgggcccctgtcccaggaaccccgccctctgacttcttgccctttggaaatggtgcagcactctggcatttatcacccccacctgggtcccctgcaacctcccatcaaaggatgacccctaaacacagaggagcggggcaggcagggaggcaatgactggagctaccttgcttgttgggggactgggtacagttggcaagctgtgtttccatcagctccctgtcctcctttcttccctcgttattgatctatagacattaggaagggagtgagacggctcctccaccatcctcagccagtgcaacccattccctctgcttctctctctctctctctctctccctccctctccttccctaccctctcaccatctttcttggcctctctgagggtctctctgtgcatctttttaggaatctcgctctcactctctacgtagccactctccttcccccatttctgcgtccacccctgaactcctgagcgacagaagccccaggcctccaccagccttgaacccttgcaaaggggcaggacaaggggacccctctcactcctgctgctgcccatgctctgccctcccttctggttgctctgagggttcggagcttccctctgggactaaaggagtgtcctttaccctcccagcctccaggctctggcagaaataaactccaacccgactggaccatctctgtggctgtgtgtgttcctgcagggggtctctgatggggcaggatgggcacaggctgcttcagcctgctagggcagcaggtcaggcagcctgctggttagaatgacacctgcgtgggtatacagggacatcctgtggatcaggcgcttcataactcctttcctcctgactccagtgtataatggaaatattccctgcattatacagatgagggaacagtctcagagcagcagcatccctcactccacgcccccagtgagtgctagaaggggtgttgcactcgggccaactcttaagttttgcaaaataaatgacaggcctgctgcagtggctcatacctgtgatcccagtgcttcgggaggctgaggtgggaggatcacttgagcccagggggtggaggctgcagtgagctatgattgcatcactgcactgtagcatgggtgaagagtgagatcctgtcccaaaagcaaaacaaaacaaaaagacagccgtggtcgtttgtgctgcgtgctgtgctaagcacacagtttatcttaacccttacatagcactacaggtagagatttcattgcactccagtgcctagaacagtgtctggcacacagcaggcattcactcaatatttgctgaataactaagtgatgcccctcccacccttttagagtggtggaaacaggctcagagaggctgagtgacttgcccaaggacacacagctactaagaagttgaaacagtttgaacccagacagtctggcctcagagtcagcacatatagaggctgagccctcagcccctgaccccaccttggggacccaggtctgtctctctcgtgggaactaggcaccctcgtgtgggggctcacgttcgtcagactgagtcctcagtgacttttcagttagaggtgtggatccccatttttactatcagggaaactgaggcaggtgcttgccctaaataaggtgcaagccgtggagcagatgtcacgatcaccaaagcccatcctccccttttttaaaaaattgagaaagggtctcactctgtcacccaggctggagtgcggtggcacaatcatagctccctgcagcctcgacctcccaggctcaagcgatcctctcgcctcagcctccagagtagctgggactacagatgccaccacacctggctaattttattttattttttgtaaagacagggtctctcttgtgttgcccagcctggtcttgaactcctggcctcaagcgatcttcctgcgtccttggcctcccaaagtgcttggattactggcctgagccactgtgcccagcaatagggccccactctagaagtcccaatccctctgtgcgccccagccgcaatcaggagactttccgaacaggcacacaggaggccatttttaaatgaaaaggaaacgtttattttggtggggagtgagggtgggtgggaagggggcatgacactttttctttggggagaggggggtgacatgcggcagcttctgcattgggcggttcatgcacccagggtgggcgtgggggaggcttggggaaggggccacgccgacccctccctccctgccctgcgggtgggctgagaagacccgccattagcaccagagttggacgatttgcagacctcccctccccacactgtctccgaaccccgcccccatccctgagagcgccccctcaccactccccccaccagcgacaggctaggcccgccccgcccacatttgagtgagagaaacttattgctctgtgtgtgtgtgtgtgtgtgttggggagggtgagccgcggagctcaggaagaccccccgccattcattcctccccaatcgccccgccccctggcccgtgtccgtgcgttcccggagcgcaggaggggtgcgacatgcgtgtggggggcgcgtcatgcagcgcatgcgtgtaggtgcaggcaccctggcggccggggggaaaagggggagccggacttggaaagagtccctttagctcgctctctccctccccgaatcccacactattgacttgggggatggggtgggaggggaggagaatcacgttttgtagaagtttatcatgattgtggttattttgaaaagctgaactcaaaagctgggtacgtgtggcggactggcgagcagggggagacgttgggaagaggtcagtaccctttggaaaagaccctcaccccctttccccgcctccttcggctttcgtgaaggtcaggggaaacgggggggcttgttaaagaagttgaaccctttggcaatataatcagtccccaccccgtaccctggtgtctggagcccctagccctttgccccgcccccaccaaaacccgccccacccctcacccctgcttcaccagggtttagggtccgagggaaggatgggggggactcaaaatgccccttgcataggaatcgttgcatcgagaatcgtgctcagtgacgccccccatccaccctcgggtggggggttcctgaggccgtgggagcagagggagggaggtggctaattccgtgggaccccggctccaaaaggggggtccgctaaagagtctgggaccggtgtggtctctgggcttgggggaggtagcgcatccttgagccaggataggaggtgggaaatgattttccacccgcgagcgtgacgcggtgaggaccgctggggaaggggggctgggatcccagccgagctgggtgttgtcggttcccaatcttctgatactccagtgttcctcccttcgggaacagcctctgtgatcatctgtggactactttaaatggaaacactcttaacctaaataaaccgtgtcctagccaagcagcgatgcctgcacttatcggcttctgtacaaaatgcgtattagagacaaaacttttaaaacaagtgtttgtcctcatactgcctcaaaccttagcacaccaccaaaggtacaaatacaaccctctgggaaacactggtgtctgtgaagagggtacctttggggcaccatctcagggaagagactcagggttaggcgtaagacaaagagggtgcttggggagggtctggttccctggaattgcagacaggttgcgcctatcttggaagttctagcatcaagggaacctgggctggacaagtctgttagggctttggggatatgggtgcggaacaggcctgaggctttgggggtgtccaagaaatgtcagttgtgggaaggatttggagcatcccaaaggctgaatttgagctgaaaagagctgggtcaagtcttggaggtttgagaagtgctgggacgcagttcagggaatttggtgggggtgtttggggtggcaggagtggggagggagggtggttcagggagcctctgtgtgcagaggttaagtcgcaggagtgtgtggggattgggagatgtggcgtgccagggtcagtctcagaattctgggtgcaggtctcatgtcctgggaatggagggagatagtcggggaatttcgtgtgctagggccagatcatcccaggaattctgggataggaggtctgagtccatgcagcaagaatagaggcgagcaggtccctgggggaaggggcggatgagagggtgaaattcaccagaggaattctcctaaaggctgagggagcaggtccaaagcccgccccgccctcccaccacctgagctcaactcggccccgccctcccgccacctgagctcaactccgatctggggcttgggtaactgttcctccttcccctacactgtttctagtttctggtttgttttctcctaatcaacgcacagggttggttgtcctcctggggtgaaggatgggaaggctggagaccttaaaggccagcccgacccccgggaggtgccacccccttcccagagtgcctgcccctcaaacccgcgcatgcggcccctggcggcttattgctgaggtggacttggagtgggggctccaggttagggaaggcatgcagtgtgtggggggaggtgccccaagatgtaactggcataatttggacttatttacacaagttgatggcagggggatgtcctatggctcgtggagacctgagaaggctttttttggggagggaagagttggggggacgggctgtggcccctctctccatcctgggggcccaggttgggggtgaggggcccgggggtgtctgctggcatcgtcatctcggttgcatattattaatgactttttgattttttttaaaaaaacccttttccccaccccccacccccagctcctttgaccttcttcccggtcacccccgagtccccccacaggggggaggggagcgctaaaggatggagggcagggtcgggggagcgcggcgggcggcccggggagagccagggggggtggcaaggggcgcgaggcgcagggacaccccgctcaggcccgcgatgctgctgaggctgcgggatttctcgtaacctggggggtggggaggtgtgcagacacaggggggaagcacgaagatggggtgcagggaagggtcagacagagagacccaaggcagggagaaagagacagagagagaaagaaatggaaggggaggacaacagatacccagagagacagagaaggcaagacagacagagtcaggcagacagagacacaaaaggacggatgacaagagacagatggacagagatggaccaaggagatggagagagaaagtgaacaaatcggggagtcagtcaacatcgatgagaaagggggagacatcggggaggggggagagactccggattaggaggcaggttggtgcccaccgagcctcccccgccccattcccaccacagtccaccgcccttccccccctccactggtcccctcacctgaggcaaaaggtggggggcagcaaggcgggatggtgggcggcaggggcgtggggaggggctgggtggaatgcatgtgggagcagccagcggagagggcagggaacggtgcggccgccgtagcggggctgggggctgacctagttgtagggaaagagagcaggcagggggtggggtctgcaagggggctgagtggagcgaagctggcagtgcccttggggaatccgatgagaactccaggagcagtgggggggggtggggggggagggaggctcctccagaagattctaaggacggggtcgggggtggggggcggtgaggcggagggctggggagagggacatctttaaagggtccaagaaggctctgagcttctgacgggtgcgggaaggctctcacaggcatctcacagctaatgggactcaagatccagcaacagtgtgtgtggtttctgcaaagcctggggctgcctgcagggttctgcacccccgcagggagctctgtggcttttccaggcaacgctaagggagctgtctggacaaaaggtgtcttgatcgtaggagggagggcttggggggagatttgaagcccagtgtcttggggacaccccctcccagccattcccaattgctaacctggggggaaggggcgggggggaccgaaagtctcgcgaggtctcaggcggtgacaagagctggggacagaaatacacagagtcacgggggtggggagaggatggtcaggggaaaccccccaacacagcctcactgttggggggatggagaaacgccgccgggatcatttcctcctctctggtgttttccgcgggaggggagcagtgaaatggggggcggctgagacatcaaatatggaaggagcttccgggctggctggggagggggaggggaggaggaaggatgggaggagggagagttctggggaggagtgggagccagtgatcaggtgagggcagatgtaggagggaggagcaggggtggaggacaagcctggaggaaaggagggtcttgggaggaccataggggacaattagggagggaagaagcctggcgcagtggctcagacctgtaatcccaacactttgggaggccaaggcaagcagatcacttgagtccaggagttcgagaccagcctggccaacaaaaccccatctctactaaaaatccaaaaattagccgggtgtggtggcaggcacctgtaattccagctactctggaggctgacgcaggagagtcacttgaacctgggaggcagaggctgcagtgaaccaagattgcgccactgcactccagcctgggcgacagagcgagaccccatttcaaaaacaaaaacgaaagggttgggaagggaaggttgtggtaggagagactcttgggggaaggagcatggggggcaataggccaaaggggtcttgtgggagggagggttgtggggctgaaggacagcaaggaaaaggcttggggagggctggagggggaaggatccagggcaccagggatagaagcttcagccaaccccatcagctccagccatgatttgagttcaatgaatggattttggcatcataggcaagagaagcagggacctcccccacccagccacccccaccccaatcctccctcacccataggcccacaccctctccccctcaatcccataggggcccctctagacctgggggtggggaacagaggaaggtaaaggactgggagtgggtgcaagcagggggaggagttagataggagcagggaggggagtgggggggtaatgagctggaaatggacaatgacggggaggttacaaaaaggagaggtgggggggatggaacaagaggagccagacagtcccccctctggactaggagcccggaagcctggggtctcggcccttgtgctctgtggcctggggtggtgggttggtcatggccttccctgaatgtctgtgaaacacaggggtttaggtgaggccattcctggaagccccccaggttcccctatggcatctccttaggctgtggacagggatcctttaggatgtgtctctgcatttctaaagaagattccacagacggctgttgaatgaatgcatgatggatcacataccttcaggtggcttcccttcacgtttaagataaagtcccgcctcctcaccatggccgaaaatccgtcctgatctttctccctggactccagcagccctctccccttggccactgggatcagcctcactgtgctccttgctgtcccttgaacaagccaagctcatcctccaccccctcccccagggaagctcagggcctgtgcacttgctgtttcttctgcctgcctggcccttttcaccctccaggttctgtgtcacctcctcaaaaagtcctttgcagaactccttttcttcccccagagatggggtcttactctgtccccccaggctggagcaccatggcacaatcatggctcactgcagcctcccagactcctgggctcagacagtcctcccacctcagcctcccaagtagctgggtctacaggcatgcaccaccacacctaagttttttggttttgaggaaatggtcttgctctgttgcccaggctggtctcaaatttctaggctcaaatgatactcccaccttggcctcccaaagtgctggggttataggcggcagccactgtgcccagccagacctctttaactgaagtggccagagtaatagtcttgttcttttatctttatcttaattgcttcttttcttcttcttcttcttcttcttttttttgagagggagtctcactctatttgtagcccaggctggagtgcagtggtgtgatcttggctcactgcaacctccacctcccgggttcaagtgattctcctaccccagcctcccaagtagctgggactacaggtgcccaccaccacgcatggctaatttttgtatttttagtagagatggggtttcaccatgttggccaggctggtctcgaactcctgacctcaagtgatccactgtcctcggcctcccaaagtgctgggattacagatgtgagccacccccgccgcccagccttaattgcttattttctgcttcttcctatgagcggctggaaacttttcctgtaaaaggccagatagtaaatctctttggctataggggctgtatagtctttgtcccaattattccactctgctgtcgtggcttaacatggttgtgttccaataaagctttgtttacaaaaacagatgctgaaagatcaggccctcaggctggagttagtttgcggaccccttacaatctggagactgtaaaccgtgatggcagattcacgctttgttttatcccaaatttgtagtgcctgcaactgtgttctcaagaatcagttgtggccatgggtggtggctcatgcctgtaatcttagcacttcgggaggccaaggcaggaggactgcttgagcccaggagttcaagaccaacctggccaacatagcgagaccccaacacttgaatccaggaggcggaggttgcagtgagccgagattgcaccattgcactccagcccaggtgacatagcaagacagtctcaaaaaaaaaaaaaaaaaaaaaaagaatcagttgctgaaacagtgaatgaatggattgaatacatgaatgaaaggagctaggagttggcttggattgttacaaggattaaagaatatatgttaaattcctagcatgtggtaggtacttggtgatatttgctgaatgattcgtctactaaatagcaccactgtcttatccccctcacttctgcatggccggcagcccccagtctgtcccttctgatccctgaccccgactctctcggcctcgtcccttcctctccatcctcacagccctggccccagctcacgcttccacctgtcacctcagcctcctaacttccagcctcccacctccagtccatcctcacaagaccccagagctgcccctcccagctcacctgcctcctccccaagcccctagacaaggtggcagcctctcagcccggtgcctgcctcatatctacctgagaatcctccctccacagtctagtctcctaagctctgtcctgcggttcccttcaaccgttcctgtcgatgggatttcttcctctgcgtgtggtcagaactcctgctcaaccttaaggccccactgcagatatcgagtcttccctgatgcccggccccatcccctgggagtttctagtgttcctctcactgtctgtgctccctccattttagcatacatcgcctcaaaccatgactttctaggtccgtgtctgcctcctgctccaaagcggaagctcctgggggcatggtttttgttcacggttgaactccccatgcccagtacctgggatgcgtgggtgctgtctaagcgctggctgaattcacaggggcatggacggatggctgagcctttctctccccattctgcacccagaagtgttctgggtatgccctccgttttcctgattgaatttttaaaaaaaaccctaggaccaaggagggaggcagagatgttgatgggggtgaggatggggtcggtcgtgagggcaggtgcagtgtgggaggcagggttgagttagttcgggggttagtgaggagcagggtgagtcctgggtaggtgggtgtggggtcagtgtcaggagctgggggttaactgggtgcagctgcttgcagtgagggggccgaagtctcggtcagtgggggctgcatgttctcagaagggttagtcaggcaggagtggggagtctgggggtccgggggatcagagggtgggggctacttaccccggggggagggggttcgtccactagggggatatccaggccgcggcgttggcgttgaggtcgggcaagaagcttggggggcctggcttacgccagtcttgggggggcagtgggggagcaccagtggctgggggtgggggaagaggccagagagttggggggaatggacatggaataaagacaggtgaagggtcagtggtgaggaaacttggggcgggggtacagggaagatctgggagggaggcagtttggggccaagggaagggggaagggaagtccaccgcctcctcccccatccccctctcctccctcccctgggcaggggagagagagggagggtcccaggggatcagtagggggggcacctcaccttttcggatggagccatcaggggaaggggcatagtcggtgaggaggaagcaggctcggtcccggctatagcggccacggcttccaggcgtgatggggctcttgtcttccggggacatggcaggctggtcaatggctgggcagtcctcgtgggcaagcgcagctgctgccggatccccattggggcgaggatctgcatcccaagggggtcagacagagagacaaaggagagagtgaggtgcggtgaacacgcggtggggcaagatgtctgcgaggagcagatgctgggatggtcggcggatgtttggcactggaagtggagattcaagggcagggtgatgggaaggagtggccaggagggtggcagggggcacagctgggagagggtatcaagggggcgcggctggggggtgatcatgggggttgagtgctgggaagggcgactgcagttgggaagggtggtctggacagggagttggacagattgtggtggtgcagggaggtgttgagagctgggatgtggtggtggtgccaggtgtggggtgccaggaagggtaggactggggtgggatgctgtttaaagatatggtctggagctggccacattggctcatgcctataatcccagcactttgtgaggctgaggtgggagaattgcttgaggccatgagtttgagaccagccctggcaacatagcaaaactccatctctacaaaaaatagaaaaattagctgggtatagtagtacacgcctatagtcccagctactctgcaggctgaggcaggaggatcacttgaaactgggaggtcggcctgcagtgagccataatagtttcactgcttcagcctgggtgatagagtgagaccctgtctccaaaaaagataaaagataaaagatgccaggcgtggtggcttacgcctgtaatcccagcactttgggaggccgaggtgggtagatcacttaaggtcaggagttcgagaccagcctggccaacatggtgaaaccccgtctctactaaaaatacaaaaattagctgggcacagtggcgggcgcctgtaatcccagctactccggaggctgaggtaggtgaatcacttgaacccgggaggcggaggttgcagtgagccaagatgtttccactgcactccggcctgggagacagagtgagactccgtcttggaataagaaaaaaaaaagagagagatggttgcggatgaagcaagctgggtgtcggggagaagatgaggcagtgttggggggtggttggctggagcaaacttcagggggcttggctggggtaggggtagcgggtggaggcatggctggagaggatgtggcaagctaggaagtggctgttcagggaagagtgctgggctctgggaagggcaccaaggggaagggctaggttaggtgagagatgggaggtgggacgtgggggtcccctaggctctgactccagctatttttaactggtgtgaaactgggtcagcggctgagggagcaagatgggggccaagtggcccagctccctttcttgacctacttaaggcggggcagtgcaggggggggccaccagcctctccttcctcctagactcccaagccactgcctctgaggcatagacaccccctgggggaggaacacacacagaagcacaggtaactttcttctccctcatctctcgcttgtctcttcctctgagcagcacctctctggatctctctttgggaccctcccaggctgcccacagcaaagccgactgaccaggccctggtttccgttctgccctgggggatctgccctggcctgactctccgttttgaagtctgtctgcctcttgggcttgctgtcattagaacccaaactctctgccgctgaccgcccccacctccgcccaaaatctacatcccatctctctctggtctccatgacaatctctcggtttctgactccccgcctcagaccctatcggcttcagtctctcttccctcagggctgtctcccggatgctcagatgctgctacgttccctggggttctgcctcgggtctgcctgtgattcctgtgagaccctctttctgtgtctctctgagccccacgctcctccgggtccctctctctgcacagctgatgacactgcctctgcctcgccagcccctctgaatatcttgcaaatctgtttctccccaaaactctttcccatgaaacctatgtctctgtgtgattatctgtgcctccttcttcgcctgagctcctgctgttggtttttttctccctcacctcttcgacgccaaccaccccaggttctctgaaccccggcagctacctccccagtcctccccgggtctccacctgtgcccccgatccctgacgcccaggctcacctgcccggttgatctcaatcacctcctcctgagccaacgggcaaggctcgccgggggctggcagaggaggcagccccatgatccccagcccacccgctccccccctgagcagcccggggtgcgtgtggggccccgctgggtaggccccggccacagtcacccccatggagggtggggtgatgggtggcggcgggctgatgcccccgctgccgtggtgcgggtggggcgggggtggcgggggtgggtcaggcttgcagtagttgggcgagcccggttgcgggggccgggggatgtgtttgttcttcttcttgggcagcttctgcttggccatggccagcgaatagtacatgccaaagttgttgacaatgacgggcacaggcatggcgatggtcagcacccccgccagggcacacagcgccccgaccagcatccccgaccacgtcttggggtacatgtctccatagcccagggtcgtcatggtgaccacagcccaccagaagccaatggggatgttcttgaagtaggtgtggttggagcccaggatgtcatcggggtcggcgccaatgcgctcagcgtagtaaatcatggtggcgaagatgagcacccccagggccaggaagatgatgagcagcaggaactcgttggtgctggcgcggagcgtgtgtcccagcacgcgcagccccacgaagtgccgggtcagcttgaagatgcgcaggatgcggacgaagcggaccacccgcaggaagcccagcacgtctttggcggccttggagctgaggcccgagaggcccacctcgagatagaagggcaggatggccacacagtcgatgatgttgaggctgcttttaagaaactccaccttgtctgggcagaaggtgatgcgcatgaggaactcgaaggtgaaccagaccacgcacaccccctccacgtaggtcaggaagggctccgtctccacctccacgttggtgatgttctccggaggtgccccggggatcggggaggcctgggtcaccgtcttgttgctaatatggatgaagccctcatgggtttccaggcagaaggtggtgatggagatgaggatgaagaagagggaggcgaaggccacatactgcagggcagggagggagagagagggggagaggtgacctaggcatcaggttggccataacatccagaagacccttccagtgcccccttccccagcctcctgggcccaaactctgggcaaaatccaggtgtctcagccctgtggctccatcacttccagaatcccattctcccctctaaagctagcaaaaagggagagaaaggaacagaggcagttggagaagagctggccccagcagacgcagcagatgggcagcttctttccttggaaacatttctggccccttgctgtttcctagaccacctccccccaccctcctgttccctgtgtcctatttcagggccccccagcagggtccacgggttctgctgtgggacgggagccgccaggcctaagatcacacatcctgtgtgtctcggaggctttagggctcagcttggagctgggcagacgggaagggagaaggcgggcagggaggcagaatcgtgaggtggttaagagtcggcgagcctgggcatgaatctggcttttaacctgtcaaaactgggcaaggagactgagctttctgaaccagaagtttgtagtgggattgttgtgaggattaaattagatgagcgtacgaaggacttggctccaaacacagtgcttggagcagtgcctggaacacagtaagaagacctgagctgttgttagggtatgcaggcagcagttagttggggggcaaggtcaaggcctcacccagagaggacagggcagtggtggtgccacagaggggaggtgggggtccgggcccttaagggaggaggggttgaagggttaagcctgcaaaaatggaagaggagataaaagaggagagtcaggcagggtttagggccctgaagaggaaggagagtcactggcctggacattgtgggaaaaggcagagccagggccaaagagaagttagggcatttgccaaaggggcagagaatgaggggtgaagggtcctgagccatttcaagatgggggataaccagagtcctgccacacagtgatgtgggttttgatgaaggcctagaagaggagggagtggggtcagggtcttggagaaggaaagcaatgggccaggcccctagagatgtcatgggctttatcagatatgcagaggggtgggaggggagaggagtgcattggagagggaaggaagacaggtgttatagtaaagagagggttttaatcctgcgggtagtggaggagggagggcatggggagttttgctattaatcaggggcacagagcacggggaggccactgctggaccacagagaggaccttggactttggggtgggccaagggccagcactgtccctctgtgcaccccccttcctccacaggggttgggctctgggcttgacttcactgaggtgcagagctgggaagtagtgggtggagagtttcggggccacagagaggaccctggacgttggggtgggctgggggccggcgcaggtcctctctgaactccccccccacccccaccttcgcttctctgcagtggtttaagaggccagaggccttcgcagagcgcatgcctagttccccgccccctccgagccgggcgcgcggcgctagctgcggcaccgcagtgggggcgggccagccgggccggggggcggggcgcacggcggccagtaccgcggacagctcccccgccgcagtgcgcagccgcagcggctaggggccgtcttaaccccttccgggccggagcctattcaacgcgcagccgcagtgttgctgctttccggcgggaggccaagggccaagagtctaattaactccttccctcccagggcacagggaaaggtgggcacccgccgcagtgcgcagctgcagaggctggacggcgtcgggctggtttaaccccttactccagagtgtgtcaaaagcagaaggggtaggagggcatggagtctctgtaagaaggaaaggagtgattacgaggaagggggcgggggcagggggctgtagggtcggaccctccactttgctttggcctcagctcccaactctctcaagccatatcactgggaggctggaaagggctcggcacaccttggacacccaaaacacattggcggagtaaatgagtatctcccgtagctgtcccgaacacctagcctgaccatcacagaagaactctaacttcatcccgctcctcatctcagcacccttcaatggggtcacaggagagaagggcgccccggccatgggggaaggagccgctcagtgtcttgagggggcatccagggccatgtcccttccgcacctcctcttccccacctccccccatccaaccccaaatctcgccaactcagcgctttctggggaccaaactttatgcggtggctccaggcgtccccccgctccctcccccggcgcgaatgcggcactgcggctccgcgtccttcccggctcaggacgcggcacggtggggggagggggccaagacctgctcctctgtgtttgggtacccaggagcccaggagggggtcttgggatcgctcttatttcccccatttccaattgcccccattttgcactgccccccttttccaccacattctccctccggggtccccgggacagggaggaagttagtaggaggaaatggttcaggagagaacccagggggagggtagtcatttagcctaggaagttatggatgcttgaggaaagttttctgggagcgatggagagagctttggggaaaatctagaatttggagagagagagaaggctctttggttcactttgatggagggggacagactgaggggctaggttctgggttttgcacggcggggggggaggttcgagaaaggaagagggcaggtggaaggaatcccagggcaaggtagaaagaattgtaagttattttgagatgaaagttttagggctgatgacttgaggggcctcccagggtttgaggttagaaaaagttctagagcaggagggaaagtcacttagactaggaaacgggctgtgggggctttggatggggggagtcccagggatagagagtgcactgtgcagttaaaatgatggagaggagaagctgcgaggatctatggaggaggaagaacaattctggaggacatgtgagggttctggagaggaaaggcatatgatgggggcatgggatgcttctggaggcactgaggaggagtgtgaaaggcttgggggaagtctggagctttatggggaaagtccttgagatgggagttggcgtggaggttgaagagtgttaaacacagagtgaacacagagggggcctggaggttccaacggagaagatgccccaagactcagtattgcagtgagggggaggtgaaaatgtccaggcaagaacaagtggaggtttagaggggtccagaaggctgtgaggttggggtgggggagttttctgagactctgagagcagaagatactgcaggaagggagtggaaaaaataatcagaagattcaaacttggagagagaggtcttctgggagacgggccacggggtgaatcggggaggtgctgggagagactgagagttgaatagggggccccagagagtctggagaaggcagggaaagtgggggtcagggctcacagggcctaggagaatttgagggctgagaagggatgtcttctgaggggctggggaaggtccaagaaaccaagggctggacggtgaccaagagtagtgagaagagatttgatggggcccaggagacatgagggttggggagggtctcagaggagcccaggaaaggtggggaccgggttgttcagagaagcacgggagattcacggtctggaggaagtgtctaagcgtctagggtggccttggcgggggagggggaactttggaggggtctggaagagcccgaaggttggagatccgtctttggaggatctgggggatggctgcgagaggggggtgtgttcggaggagcccaggagactcaggattggggaagaggcttctaggagactgagaagcctagagggacccggagggttggagctggggcgctcctgggagactgggggcgcctggagaggcgggggtggggtggatgggggccccgagagcgcgctcaccctggcagcccgcgacgagtaggggtcctcgaagagcgcccacacgcggggctgccagcggcgccaccatgtgccgcccgcgccgcccgcgccccctggcggccccccggcgccgccgcccgcgtcctggaagcagaggcgcttgagctcgccgcccgctccgtccaggccgccgccgcccgcgcccgcctcgtcgtccaggcctccgtcgtgggcgcctgcggcgttggcggcgttggcggcgcccgcggggtcgggcgcctcgaaggagtcgagcgcctcctcagcgtcgcgatgctgccggtaggtcatccagcagcaggcctccacgtcggtctcgtcgatgccccagaagccgagctcctcctcaaacaggggcccgcacacgtcggctgggcagtgcagcttgccggtgcggtagtagttgagcacgtacgcgaagactcccgggtgccggtcaaagaagaactcgtcggcgcccgggtcgtagtcgaagcgtgccgccgcctcgggctccgtcaggccggccagccgcgtccccggcagggtgcgcagcgtcgagcggtacgtctcatggcgcacgccgcccacgttgatcacgatcttgccgctgtcgccaccgccgccgccgtgccgccccatggccgccgccggcagcccggggcatggctcggcgcgccggtccccgggcccgcggggtgccggggggcccgccggggacgcggcggggccgggctgcgcaggctgctgctgctgcggcggcagcggtggcggcggcggggactcgggcggctgcggcggtggcgccggctgctgcttgctggccccctggcgcccgcggaaggacgagacgcagactgagctcagcattggacggggggcggggcgggaggggcggggacgcaggggcggggacacggggggagagaccgacgggattgggtgggaggaggagcgaggtagcgggggcgtggcttaggggagaggaaccaaactgattggcctgggggaggtggggcggggctgtggctgggaggagtggggcgggcactctaacgcgacccagctggacgagtcggggccgccaatgagacggagcgattggctctttctaagagagcagggaggaggggcggggcggggcgtcaagggaggcgggaccggttactactaattgtgttcggcagcactggtagccaggggaaggcggggctagatacgatagagagagaccttactgaactgaaaaaagtgcgggcggggtagagggaggaggggacacatccaagctatttaaagacgcccgactggcctggaggggcggggccaccatgagagaggccgtcctgattgggctgagaaaggggcggagagaaacaaaacagatcgcacgccctcacctaaaacaccgctaggcaggacctggtggggaggagcattgcttggaagagacagggccgcagaaagtagaaacggtccagatgagactgcatggggcgggaactagagatggaggactttcccgcgcaagggggacaggctggactgaaagaggacacgggaagaacaaagacttagactcggtgagaaggtgttgaaacttgagagagtcctggaaacccgagagggtctggataggcctaagggagggagcggggctgaggctccaaggcgggcctggttagtcggggctgggcccggagaatgagtgtccggatggatgagtggtactgaggaaggtgagtggggtcgacaaatagaaaacgtcttgaggcagggcgcagtggctcacgcctgtaacgccagcactttgcgaggctgaggtgggtggatcatttgaggtcaggagttcgagaccagcccggccaaaatggtgaagccccgcctctactaaaaatacaaaaattagtcgggcgtggttgtgggtgcctgtagtcccagctagtcgggaggttgaggcaggagaatcgcttgaacctgggaagtagaggttgcaatgagtcgagatcgcaccactccactccagcctgggcgacagagcgagactctgtgtcaaaaaataaataaataaaagaaaaagaaaacgtcttgaatgggcggtaggaaagagagactaaggaaggagcggggcttgagggtcttgaaagcaaccagggtaggcgagggcagggcagggctaagggagggtagaggaacgggagaggtggatcccaggggaacaatgagactacaaagagtacaaagctactgggctggatggaggggagggacctggaacggggagtcttcgggatcagaagacctgggagagggcactgcctaaaggtcacagggtctcaaagggcgaggcgagaacttctaacgaacgctacaccgcggcggactgcagattggaggaccgagggtagatgaggactggtgaggagggggcacgcaaggaggcagagaggacgggagaggggagaggccaaagcgccaggaagcaccgtcaagactgaggcaatataggcaggaccgataaaaaatggggtgggctaggagtctcagaggtcgggttctggggaagaatggagtgaggggcggggccagaaaaaggggaccgcctcggagcgggccgtccccgccccctgggcggtcgtaggctccgagaggcagagcgcaggctcagggggctggggcggggccagcggctgcggctggggctgcggagggaggaggcggcgcctgcgggagcgaagggggcgggtcagggggctgcgggcgccctcgggcagcacagtttctggcccgccgcttcctgctgcaggtgcggcggctgattcgtatcgcctcccaaccccatcccacccccgctcccgtttctgggtttcttggcgtctctttttctcccttcttgagtatttgtgccgccgtctctgttcccacccctctgagtctccgacccctcgtttgtaaatctgccctcctgggtctctgattctgtccccctccttctgagtctttgctcctcttctctctaggcctcagtctctcctccctggtgtctcagtccccgcccccccaccccagctcccccgagtctctttctcttggtttctgtaccattttatcaggggtgtgcctctctgtctggggctctgtaccgcactccctgggtcttgtgtccctgtcctctactccctccccgcaacccgctttgtcctgcctcctctctgggtctctgccctttcatctgagtctgtctcctccttgctctctgacaacctctttcccctcccccttcttcttccccttctccccatctctggtgtatttccccctccttcttccccttctccccatctctggtgtatttccccctccttcttccccttctccccatctctggtgtatttccccctccttcttccccttctccccatctctggtgtatttccccctcttccgtctctttccctcctctgtctctgctctttctcttgctggctctctgttcttctctctctccctctaagtttctgcctcttcactttctctatgtcccctccctgagtctctattcctcctatgtttcaccttcttctgggtctctctctttctaggtctctgtctccacttcctggggaccctgtccccctctctctgggtctccgttcctttttctcagaccccccatcaccctctctaacccccgtcctagctgggactgcgtcactgcagagagagttgcagaagtggggcctgtcctgcagcccaggaaggtcgttgccctcactccccagacccagggctctccattgcacccaatccatcatgtccttcagcttctgatggaatccaagagggcacagaaaagacataggtacttcctaccccttccccgaattctggtgcacccccaggcagaagcagagaatcctgaggtgagggactgggctggggctggatgaggctcctgggcaattgggggtggggtggtggaggcaggagcaagggctgggtaggcactatgggctaggtaaggacctcggtcgccatcctcctccacactcccccctcaaccctgcttttcccttctgcttttcacagcagccaggcacggtatcaagtggctaaatcagcgtttttttgcagaggtcagaagtgtgggagaaggtgggggctgtggggaaaaggggctggaataaggaggaatgtgcgatgcgactcaggattagaggccatgggaggggaagaggcagcgggccgggagtagcaggctggtccgtccacattccatcaggccctgggaaacttggatgccagcactccctcatggccctccacagaccccaccagggtctatgggaggatttgtgagcctggagtctccacccacccattagagaggagggggcttctggaagcttcatgagggctccaaatactggacactcagctatgttcacagaccaggaggaagtagactcgactcttgactagggacaccaggaggggagaggccaacgtctgtctcgttttcagttcctttccccacccctgctcctcccaatccatccgttcccaggccctcaagacacaaaattcctgaaagctccaactcccatctacgtcatcttcggcgtcccctgataaccctccctcccccattaccccaggccctggaattggggaagggtcttccctccctgacttctacgaccccttccttgttcctctgcccccattcccacccggttccattcggagccttggtctctggacaccaaaggtgaaaatgtgaggactctctgcctacgatccttcgtcccctaaaaccctccaagtaccttggccccgaaagctcagagtcgaggggaatctccccgctataatctttgggtccctggatcccaagtcccccgtctccaaaactaggattcgggctgtcttaccgcccccggaccctgagccttcgccccctcccccgtactcaccccaagtcgaggcgaggtggggatgggggaatccggggctcgagatggggggaggggtgacccagccccggcagctctgggcagcaagaggctgcagaggggggagtgacatcaccgccggaggaggggcagcaccgctcccccaacccaggggcttcaagctccgcctttatggcggaccccggggtcctggaatgccaaggcagagaggagaaacaggagacgaggtccgagggaacggtatccccgccccttagaacaggaactggtaaacccttaccaattacagccacccccgactgccacctgtggctgccgtcgcgacctgtcgcctcccacgcatgttgtggctgcgcccgcccccgtcagggcgtgaccacggcgtggactacaacgaccgtgatgctccacggagccaggagcctttgacgaaaggcagcgtaggcgagggccttcatgggactcgtagtacaaggcccatcacaagggtgcgccgtggagaaaaggggtgatacccttcgcctccctctcttcctcaactccgtgggtccatgcacaaagctttctcttcaaaaagtacgctctgaaaagaagcaacctaggcaggttcgttcaatggaaatattggatttttactgagtagcgctagctctgctacccggtgcgcatgcgcatcacctgggcggcacccgcggtactgcgcctgcgcggtctcgcgccttcccaggtccgctccgcgagggcgagcgcgcgccagtcccactcgtgcgccgctcttcatgtccccgcggtcgaagacggtcacatacgcccccaagaaaacgtcgccgaggatccacacaggtactggaggcgaagcgatgtccaaggcccggaagccggacaagcagaggcggacgtcaccctgagcaaactgcaaggcgacaaggcggcaactgggtgtccaggccgcaggaaccaccatttccctgggagtccgtgctctctccgcccccaaccccggggacaagaaatgtttctgtggccccttccggccctagtgatgtccaactaccagctccaccctctcaactccagtcatattacatcactgtggcgtcattatgacggacacctacctggatgacgtaatcctgggccgtgagattaaaccagacccccccaatgaggagtgagactgcggggagctttgggatttctgagcaccggatgatgtactggtggaggagaggaacaagtgaagatgggagattcctgctctgctcaaatcccgtccgtggctccccagtgccatggagtaatgttcatattgagcacctgggtattcagcaccgtgtgtggacagccctgttgcctaggctcctctcatctagtcccaaacaaaactgcattatcatctcccccaacaaccccccccccactcccacccctacttcaccatccactgagccacttagcatagacacttgggaagtatctttgcttcctcccaccactctctggcatgtcacttaagaagcccagtcccctctgtcctggatacgctctagctacctgcttcccatcctcaggccgcagtgttcgccatggaattgccatcatcttccccaggacacacccaccagagactgggacctcacctccccagccagcaaggggattcccccaatggctgcatgcagggcccggatctcctcagtgggtcctacgatgacaggtgtgcctgtatccaggatggcagcacagccctgggcacagagagtcagccgtgagcccaccttcacactgagggggaaggaagcagtcattagaggcagggtcctaggagtccaggcctccagctccagacccaggagaccaagtccctcaccgctccatgtggatctgccagtaggcggggactgtgactggcacgaaggtgaggggtgggatgtagtgtgccgggtctgagccccccaggaccagctctcctccatcagccacttcagggtccctgcaggggcagagtgtagaggtcattgtcgccagccctcccccgccagccctaggaatggccagggatgggacttcctgccaattgggtcatttttggggttctagttggggcagtggaatgcaggcagggccgagatgttgggactggaaacaagaaatgaagggaaatggtgcttttcttgatggaagttaggactttaggatgatggatacttcctgaagtggagaggagacttcttcatttggctgtggaaggtagagcttttgggggaaattcctgagctgaatatcatagtaaccaagcagaccagtggagtctcagaattggctcgaaggtgtgacttgtacaggagtggggtggcttcctgggaaggtgcatagactttctgaattgcctgttgtggtatctagaaaggtgttagacttcctgagctggctgagagtgatgggaacggggatggaaacttcctggaagatgtaaatgagtgggacctaccgagagctaggtggaacttcttgagtgggttggatgtcagggtaactgagtgggcattggactgtgtgtgatgggccctgggagggaaagtgaagacttctcgggtggtgggtgggacttctgagcataagattgaccttcctaccaggtgggtggggcttcgtgaattcaatcaggcatttcctgacttctggtcagtgttctcaaatgggatttgagctttatggtgaagagaaggttcctgagtatttggttgggtggggcatagaatttcctagtttgattttgaaactcagcatattgaactgttggtgagtttctttaatatgtcttaagttgtcacttaagctctggggcttatgaatagggttgaggtgtttcttctgttaggtaggtggctacttcctgaatgaagggtgggattgattttttttttttttttttttttttggagacggtctctctctgtcacccagactggagagcagtggtgcgatctcggctcactgcaacctccacctcccggattcaagcaattctcctgcctcagcctctcaagtagctgggattacaggcatgtgccaccgcacccagctaatttttatagttttagtacagatggggtttcaccatgttagccaggctggtctggaactcttgacttcaggtgatcaatctgcctcagcctcccaaattgctgggattacgggcatgagccaccgtgcctgaactgggactttctttatggagtaagagacttcctgaaggagggcctcacttccttctgaggaataggactcatagataggtgcaccctccccagcacctgttgaagtaaaaggagaagacaggcttatccaatagcccctgctccaccagtacatccagcgggggccgaactccttccacagacagaatgggaaaaccgaggcccaatatcccatcggggcgggaaacagtgaagaccaggctggattcccacagagcttccccgaaaatcacggatgcacccttgattccaccaatctaggggtagattgagatgtgaccagttacttttgggaggacaataaccacatgtcctgaggtctcccaaaccaaagcattaatcccaggtctggggacatctggacccaagcccccaactgcttagcaaactttgcctctggacttgagagaattcctatcccttcacccaggaacccctccccctccttgagaagccccatccatcggctcaggaagcccctgcacctcaagcccctccctaagccagatgatcttagacaacagggttctcccaggctcgaggcttcctggagtcaaaggccactcacagtcagcttgtcctcactcaggattccatctacccgcccagttccatactgaatggcaaacttggtcccactgggcttgaaggagctggaggcattgggattgaagcggtggtggaaccctaggtcagaagtcagagaggtgtcactgtgggaggggagctttccgaatgccttctgcccctttaaccttctgacctttgagggtgtcagaaaagaacagttcctcaaaaacctttgggaagctgaggcccagccccgccttctcccttcacccccattcagccttattctcccacatagaagctcacagcagggcacactgaagaagtggcatctcctggacgggacccagagattggaggagccagtgtcaaaggcaacagtgaagttttgtggaggcgttcccagcccaatttccccaaaatactgggcctgaggaggcaaaagaagagacagagtcaatgaagagtttggctcaagggcacaggagtgggggctgtgtagggctgtgactcacatccaggaatttggagagaggtaccgaggcaggcttgtccccaggggatggggcccccaacttggggagctctgctggttttccccatcccctcagtaggttcagggtcctgcgtccagggtggacttgacgaagagggatcctgtagggtatgaagatgatgagaattaggaagccgcccttcctggagaccctctaaaatagacttacccaaatggaatatgatgacaaattcaacatttccaaggcgctacaataggagtcattaccagaaaccctacaataacaacctccgggaaaccctagcacagaaaccatgatgacagatatccccaaagactttacaggaacaaaccatcccaaacagaacttcccaatggtatccaagtccttaaaataagccattcccagggaattgacattctcaaagttttcccaagaccctaacatgaaatctgacctttgcagaagccctcggatggtggcccttgcatgcttcagttcatgatgttggagactatttccccacccttgcggaaaaacgtaagcatcaaatcttaatttcacttttttttcctgcaacctctgcctcctgggttccagtgattctcctgcctcagcctcccgagtagctgggactacaggcgcgcaccaccacgcccagctaatttttgtatttttggttgagacggggtttcgcaatgttggccaggttgctctcgaactcctgacctcaggtgatccacctgcctcagcctcccaaagtgctgggattacaggtgtgagccaccgcgcccggctgagacagagtcttgctctgtcaccaggatggagtgcagtggtgtgatctcggctcactgccgcttttgcctcccaggttcaagtgattctcctgcctcagcctcctgagtagatgggattacaggcacgtgccaccagctaatttttgtagacagagtttcactgtgttggccaggatggtcttgatctctttacttcatgatctgcctgcctcggcctgagccacaacagcatgagccaccgtgcctggcctgaggaaagcttttctaagcatgaaggcaggatcaaaaatcatgggggaaaatattaataagtgtgactcaaaattgacacctgttggccaggcaccatggctcacgcctataatcccagcactgtgggaggcaaaagcaggcagattacttgagctcaggagttcgagaccagcctgggcaacatgttgaaacgctgtctctactaaaaatacaaaaattagccaggtgtggtggcacacacctataatcccagcttcttaggaggctgaagcgggaggattggttgagcccaggagttcaagtctacagctacagtgagctatgatcttgcaactgcactcccagcctgggcaacaaagcaagaccctgtatctaaaataaataaataaatacaataaataaattttaaacccttgtacttcccctctacatacacacacaaagctgtaaataaaggcaaggacaaaaaatctgggggaaataattataagttgtatattaagagttaatattcctaatatgcaaagagcttctacaaataaataacaagataacccagtcttgggagacagtttttcttgagtctctcacatgtctgcagagcactgacttgtcttttgaaggattttgtttagtgaacagccttggaagagagatagcatctctttctggagcaaagggaaggcaggcttatgatgccttataaaagatttaagctccctatgctcaaggttctattaatatcatgcaccacagtgcatgtgcaggtatcatctggccttcttcatttcatcttgtggaaacgggctcagaaaaataggccagctgtggtggctcatgcctgtaatcccagcaccatgagaggccgaggtgggaggattgcttgaggccaggagtttgagaccagcctggacaacatagtgagaccctgtctctacaaaaaataagaaagccaggtctggtagcacatgcctgtagtcctagctacttgggaggcccaggaattcaaggttacagtgagctataatcatgccactgcactccagcctgagcaacagaacaagaccctgtctcaaaaaagaaacaaaaaaagaaaaaagaaagaaaaaactggcacacgtactaatactcttgctactactattgctgggagtaataaactgccctttgtctctgacttgggagtcttgggtcttctatgagcagccatgaaactatggcaaactaacttcatagttcttgacgctcattaggaaaatggacaaaggacataaaattgcaaaagaagtacaaataaattctaaatacatggaaagatgtcatcaacagtcatcaaaaaaatacaaatgacaacagtgagaaaccttgtttcaccatacagattggcaaagaactgagaatacttattgttgattaggtttgcaaatgtgtatcaaatgctcgaaaattgtacccaccatttaacacaacccagaatttcatctataggagatcactggatgagtgcacagaggtgggtttatgaggctgtgcctaattttggaaactggagacagtccaatgatgaactgcctttgcaaaaactataagtgagaaaattaggacagtgaaagagatctgatctaaacaaccgctaccttgcctttaacttccaaactgcctttggtcattcctgggcttaggccaagctaactttgggagacagtttatagtttaaatggtaatagtccatccccaaaactaaaccacctttgtaaagctaatgaagtaccaccaggataggaggatgagaggagcatgaattctgctaaggtgcagacataaatgattaccagtcattattccagaggtcaaaatatttgcagcttccccaattactcctgcagattacatcactactgtagaacctgattggccttttgagactaagggtttttgcatttctggtgatgccacccagacctgccaaccagtcctgtggctccacccagaagcagactattttccaggcccctatgaatgattacatccttgaccaatcagcagcacccattcccaggcctgacaaactatccttgaaaaaccctggcctccaaatgttaggggaggctaatttgttgttttcattttgtttttttatgagatggagtctcactctgtcacccaggctggagtacattggcatgatctcagctcactgcaacctccaccccctgggttcaagtgattctcctccctcagcctcctaagtagctgggattacaggcaccaaccaccatactcagctagtttttctatttgtagtagagacggggtttcatcatgttggccaggctggtcttgaactcctaacctcaggtgatccacccgcctcggcctcccaaagtgctgggattataggcgtgagctgccatgcccacctctgatttgagtaataataaaactctggtctcctgctcagccagtggctcggcataaattaaactctttctctattgccgctttcctatcttgataaattggctgtatctgggcagcaggcagaaagaaccagctaggcggttacagtggccaacaatgggtacagcttagttctgctttggaacatacatagaatggaaccccatttgacctctaagaaggaggaagtagctgtctataccagtcattctcaaactttatttagcatgacccaaaatcacctacagcagtggtgttgggcaaatctttgtgtagaggctttgcaggccagacagtctctgtggtaactattcaaatctgtccagatagcatgaaagcaactgcagacaacagatgctatggaaatgaatgcgcatgctgactccagttttgttagagacagggtctcactctgttgcccaggctggagagcaatgacacgattgtggctcactgcagtctcaaactcctaggctcaaaggtcatcttgtctcagcctgccaagtagctggaatcaggcatatgccaccacatcctagctaatttttttttcattttttgtagagataagttcttgctaagttgcccaggctggtctcaaattcttggccccaagcaattctgcctcggccctgcaaagtgttggggttacaggcatgagccactacatctggcctagattccctttagcttatttgtaaaagggaaatagcacgcagggtttgaccctcaggctcagtgtttgccaagcccagactcagagggctggttcaaattcagatctcttaatttttaagtagatctgggatggggcttgagaatttgcatttctaacaaggtcctgggccatgctaatgctattggttttgagacaacattctgagactcactgttctttgcattgacttggaaaatgtccgtgatatattaggtttgcaaagcagatgaatagggaatgatgaattcattgaaccttacaccagcaacatctatactctcagagtcctgggagaatttcagattgtaaatccttacttattcaaagatcttactgaggtgggaggattacttgaggccaggagttcatgaccagtctaggaaacatagtgagaccccccatctctacaaaaaaagaaaatcttaaaaaaaagctggttaacaaacataatgtgcagtaatttttaaaataaattttatatttaatgatttttttgtagaaagagatggggtctcactatgttggccaggttggtcttgaactcttggcctcaagcaatcctccaggcctctgccttccatagtgctaggattacaggtgtgagccaccatggctggcctcatgcagtaattttttttttttttttttttgagatggagtctcgctctgttgcccagactggagtgcagtgccatgatcttggctcactgcaagctccgcctcccaggttcacgccattctcctgcctcagcctcctgagtacctgggactacaggcgcccaccaccacgcccgactaatttttttgtatttttagtagagttggggtttcaccatgttagccaggatggtctcgatctcctgaccttgtgatctacctgcctcggcctcccaaagagctgggattacaggcataaggcaccacgcccagcctgcagtaatatttttgtacccaattttagtcactccttggagcatgacaccctcactcacacctttgccctcacccctcatgactcagtctttgaaaggcacaagaacgagaagtggggaaaacactttccggaaaatacacccctccccctgcgaagagccccaaggggtaaggagaagagaagagaagaggggaagggagaaattggggaagcatcagaggtaaggtaggggagaacttcttgggtggggtccccaaaactggacttcttttttttttgagacaggacctcccttgtcgcccaggctagagtacagtagctcaatcatagctcactgcagcctcaaaaccctgggttcaaatggtcctcccacctcagcctcccaagtagctaagactacaggcacctgtcaccgtgcctggctgattttttttttctgtagagactgggggtctcactatgttgcccaagctagtcttgaactcctagcctcaagcagttctcctaccttggcctcccaaagtgctgagttgacagtggtgagccattgtgctcagacaaaaaaatagacttcttgaggcctaaacaatttggagggtgtgaatgtgggggagtcttagtttaaatgtcacatgccttggtctccaagatggcgggaatgtgtcacatgtctggagacccccataactggtcatcagagcttggagtgggatctgcagaggcctccaaaaaaacatatccagagaagaaggggagggttcctcactcaagagtcttagtgaaggccgggtgtggtggctcgcgcctgtaatcccagcactttgggaggccgaggcggacagatcgcgagttcaggagttcaagaccagcctggccaacatggtgaaaccccatctctactaaaaatacaaaaattagccaggcatggtggtgcgtgcctgtaatcccagctacttgggaagctgaggcaggagaatcgcttgaacccaggaggcggaggttgcagtgagccgagaccacgccactgcactccagcctggcaacagagtgagactccgtttcaaaaaaaaaaaaaaacaaaaaaaacaaaaaaagagtctcagtgttggaggatctgggacttaaaagggctctgggctggacatggtagttcacgtctgtaattccagcactttgggaagctgaggtgagaggattgctcgagcccaggacatggagaccagcctgcaaaacatagggataccctcttctttacaaaaaatttcaaaaattagctgggcatggtgacacatgcctgtagtcccagctacttgggaggctgaggtggaagaatggcttaagaccacgagtttgaggctgcagtgagccatgatcgcactactgcactccagcctgggtgacacagcaagacccaatctcaacaaataaataaataaaaagaaaaaaattattttaaaaaaggagctctgagccagacgtggtggctcacgcctgtaatcccagcactttgggaggctgaggtgggcagatcacctaaggtcgggagttcaagaccagcctgatcaacatggagaaaccccatctctactaaaaatacaaaattagccggggtggtgtggcacatgcctgtaatcccagctacttgggaggctgaggcaggagaatcgcttgaacccaggaggtggaggttgtggtgagccaagatcgtgccattgcactccagcctgggcaacaagagtgaaactctgtctcaaaaaaaataaataaataaaagggagctctgatcttaggagatgtcagagtagagccctcggggtgagagcccactttagagatctggaaagccaagaaagaagagtcaaggatcctgggtgccaggtttgggaatcactgaaccaggagccccagacttaaagggcaaaaagcagagaatccctcccaggtttgggggtggcaaatggggtcaccataccggatcagtgtggccccagcaggctccacattcagcagaggcagcagcagcagcaagggtagcagcagcagtggtggagacattgctggggagccgggtgtgaacccaggcttcctagttttctttcccctgtgactccaccctgtttatgccccacctcccggtttaggaggtgaccagaacacgaggtctctcagcaggtgacacagggggacaaggatgtttttgaagatttgtgcagagtatttgtgtagtgtcaacaaaagttgtatcctgtgtccttagtgctcctcattccctacttggggggtggtggtcgtggggtgtcctctgctgggactgcctcccaccccccatcctttagcctctgtcacttttacttctcactttcacatcacttttctgagactcattaaccacagtgtttccttggccaagtgggagggaccagcaggtgtctgtgaagggcctggggaagggagagaggaactgattataagcctgccctcccatatgaagtgggactgcctgcgtctgaggacccagactcttatttgtaggtgaagtatgtttcttgtaagcaacaaaacattgggtcttctttttcatccattcatccgttctatatctttttattcgagagtttagtccatttacattcaatgttgttcttgataaggacgtcctcctgacattttgttacttgttttctggttgttttgtagtattctcttctttctgtccttctttcatgttatttatttatttatttattcatttatttttgagacagaatctcattgtcgcccaggctggagtgccgtggtgcaatctcggctcactgcaacctctgcctcctggattcaagcgattctcgcctcagcctcccgagtagctgggactacaggcgcgtgccactgcacctggctaatttatgtatttttaatagagatttggtttcatgatgttggccatactgatctcaaactcctgacttcaggtgatccacccgcctcagcctcccagagtgctgggattacacatgtgagccaccacacctggcctctgttttccttttagagaagataattttccttggtcatatgatttaattttttgcttttttttttgtatctgttgtatgttttttgatttgaggttaccatgaggcttgcaaatattgtctttttttttttttttttttgagatggaatctcgctctgttacccaagctggagtgcagtggctcgatctcggctcactgcaagctctgcctcctgggttgacgccattctcctgcctcagcctccagggtagctgggactacaggtgcctgccaccacacctggctatttttttttttttttttttgtatatttagtagagacgaggtttcaccgtgttagccaggatggcctcgatctcctgacctcatgatccgcctgccttggcctcccaaagtgctggggttacaggcgtaagccactgtgccctgccataaatactatcttataacccattattttaagctgacaacataaacttaacactgtttgcataaacaaaccaacaaaccaacaaacaataagaaaattagtaaaaactctacaccttcactttgtccccaactttttaactttttgttgtttgtatttatatcttattgtactgtctatgtcttgaagcgttgttgtagttattatttttgattggttcatcctttagtttttctacttaagagttgttcacacaccatagttatactgttacaatacaccatgtttttctgtgtgcttactattagcagtgagttttgtaccttcagatgatttttttttttttttttgagacggagtcttgctctgtcacccaggctggagtgcagtggtgcgatctcagctcactgcaagctccacctcccgggttcatgccattttcctgcctcagcctcccgagtagctgggactacaggcacccaccaccacatccggctaatttttttgtatttttagtagagacggggtttcaccgtgttagccaggatggtctcgatctcctgacctcgtgatccacatgtctctgccttccaaagtgctgggattacacacgtgagccaccgcgtctggcccagatgattttttatcactcattaacatgcttttctttctgactgaagtactccctttagcatttcttgtaggacagatccggtgttgatgaaattcctcagctttgtttgttctgggagagtctttatttctccttcatgcttgaagaatattttcactggatatgctattctagtgtagcaggacaagctgtggagaaaaccccacagacaccgagatagtgaaggaagtagcttttaatcagctggaagcatcagcagactagcatcttaaaattcaagcttgttgagtgcacaatttctgtcgcttttaagggttcacaacactaaagattttacatgaaaggaccgtgattgattgagcaatctagggggtatgtgacaggggctgcatgcaccagtaatcagagcaaagcagaacagaacgagaagtttcacaatgtctttccatacaatgtctggaatttatggataatcggttgctaggtcatgggttgaattttaactatcaggctaaggtcaggcaggcccaggcctggttttgggtctggttttgggtctggtgcatggcgccgggctgcctgcctttggtttcgcttccttgtttcttcttaaaacaggtactgagtatgaaacaatatagaacaatatgggggggtctctttctctcttctctcatttccccgctttgagactctcactcatggtattagtggaagttctcactttcatttttactacttatgtcttcctgtgcaatagattgatagtgattcaaataatatactcgtgctgaagcattctggtgaactaaggtagtgatgaagctttttatcatttgaagaagtataggtagcaaacaagggagtagtaagcggattcctattactattataactcctattataagagttttaagccctcctattgctgggaaccaatttccaaacatggcctcaggatcaaatccgtgccacactcgcactgtacatgtgccagttttgttatatctttaactatgtcttcaactacttgcccttgatcatctatgtggagacagcaattagtaaggttaaattttccacaaactcctccttcagctgctagcaagtagtcgagagctagtctattttggtagatagcattcctcatctgagtctcttgccgggcaagaacagtcaaggcttgaccagtttaattagtaataatttctaaaacagcttgcaactgtatgattcagttgagcatgtagatgggggtccaatatccctatgagccatcttatgcccaagtggcgggcccatagtattgtataattctttcagggggccatcatcatctttccagttacctatggctatgcttcgtttttcacgggaagcatagacagggaatcctaagagtttgttgtttttatgggcagcaggaagaaagatggtttaatagtgccaattacacagctacctgtctactgatcagatagcttagcataagctctatgtccacatatccagtataacccagtaggggcagtccagtcccagtggaattctgggtgggcctaaacagtctgcaattttggaaatttacggaatggatttttttccgtgtaattggaactccaccatgtaactgtttttgtggtaccattatacagtttttgtccaagacaactaacctgtcctacaggatgagtgaattcttttccttctctagctatgcaacattgtccaataattgaggcttttagaacccagaaattgtcagggtggttcttttgggccgagaattcatcaggaactgggtctgtaggaactcattctcgggcttcccatggccactgatctcctgttacagttgctccacaaacaaaacacgaagtgacttttagagactgggctacatgctcggctaactgcaaaaacaaatgtctagtttttcctggaatttcaggcactggcacattttgttcatcatagaaagtgtgaaatactggctctggagagcatgttcgaacctctccttttattaaaatgtttaccctagggtctagtctttttccatcaatgcctagagataagtattttccttttttctattttgggtctgaggggcttgtgattactaattttaaagggttgcagcttccactcatgcaggacaggcttcctttccctttttggagcaaaacaggatctttttcattttttttttcccaagtagcctaaatgacacaagaccagtacccacattcttttccacacaatcctgattcatgacagatgtacttattttcggtcatgtagttttttcctaattaaaagagccacatcctgctcctaacttattgctattaatgacagcacagcgtcaaatcttaagattatgcatttgggcacccctttttcttctgttctggctaatactttacttgtatcatttatgagtccctgccagtgttcagtccttaatcttatttcaaaaactgtggaaatgggaggttcagaggggtcatagcacacatcgggctggtcacttcctggatcacagactttgtactgagtgttattatacaaacatgttccttttggaattcctaggccttcataataactatagaacaaaaagattgtcttaacttgttgtcctacctcagtgacctgaggtatgcactgaaagcagtcctctgtgtgggaagaagcagtggaagcttttaccacacaagtccgtgttataaggaaagtaagtcccacgacgattttcctcatgcttcggccgcgaataggccagtcagcttccgggtgtgactggagcagggcttgtcgtcctcctcagggttactttgcagggattgtctaggcctggtttggcctcccaggttccagtggctgcaggctttccgcagctgtggtgaatcccggccggaattccttctaccttcacagccgtgggagtggtcaggataacggtctggggtcccttccactatggccctaagggagctacgttccagtccttgatccacacgcggtcacctggagaaaaagggtgaactggggagaataagctgaccgggcacctcatttacccaagttgagattgtctcggtaattttccccaaggcctgtagctgtcgctgcaattcaatttcacccaactcttggggagtacccagaagccctcgcggcataggaggaggcctatgatataatatttcataaggggagtgtcctgttttcttagagggggtgcacctgttttaaacaataccataggaagggcctgtatccattttaatcttgtctcttgacatactttccttaaactatttttgatagtccgactcattcgctccaccttcccagaactctgaggtcggcaggcagcatgtagacttgtttgtacctgtccttcttgggaaggctttccaggtattcaaaaggacttgaggattgtgatctaagccatatctgtatcagggggcctcccaagcctattaatgctgtggtttttgtttgttttgtttttttgagacagagtctcactctgtcacccaggctggagtgcagtgtcatgatctcagctcacggcaacctctgcctctcaggttcaagcgattctcatgcctcagcctcccaagcagctgggattacagctgtgtgccaccacgcctggctaatctttgtgattttagcagagactaggtttcatcatgttggccaggctggtctcaaactctgggcctcaagtgatccattcacctcagcctcccagagtgttgggattacaggcgtgagccaccacacccggtctgctacggttcttgcagactcatagaggtactgccttagtggtcttggataacatccagaagaattatctggattaccaggcagaggctcttgttctcttcttttactttctcccaaacaaagggagctgagccacctggaggtggggatagggtgacacaagcaccactgtggccagtagcactgggactgcactgggtctcgaccaaagcccactataaccgctacctggctgctggctatatttgcttaaggccctagggctctaaaaccagcaggttccaaatgcagccaggcttatatccttttcgtcagggcagcaagtttcccaaagctctgggtgggtccagaaatgcagtcagtaagccagggactggagtcaaaaaccttagaaatctacctggtgtcttgttctactgtggctgaactggctctcaaatcacaagacgctcagccgggtgtggtggcgcatccctgtaatcccagcactttgggagactgaggcgagtggatcacctgaggtcaagggtttgagaccagcctgtccaacatggtgaaactccgtctctactaaaaatacaatattagctgggcatggtggtgcatgcctgtaatcccagctactcaggagaactgcttgaacttgggaggcagaagttgtggtgagccaagatcgcaccattgcactacagcctgggcaagaagagcgaaactctgtctcaaaaaaaaaaaaaaaaaatcacaagacactgtctttcccactcttccctccctttgccacaggcagaggtgcctcaccccatggttaccacaaccataggctcaaggggagtactgccaggcttctgccaaagttcactcaaggcccgaggagtcttcagtcagcttctagtgaatgctgccaggcctaggactcacccctcagggcagtgggctcccctctggcccagggaatttccagaaatgccatcctagagccaagatctggcatcagggattccaagatcccacttctcctccactgtgtctgagctggtacctgagctgaaagacaaagttccttttacttttccctctgcgtttctcaagcagaaagagtccctcactgtagccaccatagctgggaatgtggtgggtctcacctgaagacagcatgtctcagagtctcaccgaaggccaatagcatgtagtacctggcatcactgcttgttattcagggcccaacggctcttgagtcagcaggtgatagagcctgccaggactggatccttcccttcagggtagctggttcccttctcgcccaaggtgtgtctagaaatgtcatctggaagctaagtcctggaatgggaggctcatgactctgactcgtgtcccatcctactgtgtctgagctggtatccaagatgcaagacaaagtcccctttactttcctctcctctccttaaacagaagaaaaggggtcctttttggagccacaaggtatgctacctggatttgggaaaggagtggcacaagtggccccttagctgctgaggttggtgtcttagtaggtcatgtgccccccaaatccaatggctttgagtccagctcagcaccaggacttgcctaggagttgcagtcctcatgacctagactgcctttcaactttatttaggaccccagagcactttagccaacagtggtgtggcttgccaaacctcacattccgactgttgggatgggcgattctcctctggcttgggctggtctaaaatgctcactccaggagcagacagtctgctgagttcagggcagttttgctttccactgtgacagggcagcactgagttcaatgcaaagtctcaaaatcactgcactctctctctcccaaacacacagcttctctctgtgccatgcagctactgccagggatggaggatggcgggaattggcaactaaagactgtcctcctaccctcttcagtgtgtccttcagcaatatgaagttaaaaccaggtattgtaaatgcttacctgatttttagttcgtatgaaggtgcttttttcctgtagattgttgttaaatgcggtattcctgaagatgaaatgattggtggaaacttatatttggccatcttgctccagcccctctctagacattctcttactgttttatttggaaaatactgaaacagacatacacacacacaaataaaaatcacccatagccccatcatctctaaaatgtataaaaataatttgcactgtctctctgttcgccagtccctcttctcccagattaagcttctcaatttttaacaagcataagaaatctagttaaaatgcagattcctgggcaccaccctcagctattctagtttgggaggcctaggatgagacccaagaatctgcatttttaaacaaattcactgatcggctgggcgcagtggctcacacctgtaatcccagcactttgggaggccaaggcaggcggatcatgagatcaggagttcaagaccagcctggccaacttagtgaaaccccatctctactaaaaatacaaaaaattacccaggtgtggtagcgggcacctgtaatcccagctactcaggaggatgaggcaggagaattgcgtgaacccgggaggaggaagttgcagtgagccgagatctcgcgactgcactccagtccgggcgacagtgtgagactctgtctcaaaataaataaataaataaataaataaataaataaataaataaatacaataaaatacaataaaaaattttcactgatcatggagccacaaagatgtctgagaaaccctattcaagctctttggctttctaggatagatttgcatgtcaatatcagcatgcacatttttttttgttttttgtttttggtatttgcttgtttgttttagtaaataaaagctgctgtaattattgatctgcaagtgattgtttttaacttaaccatattccctggacttcagaaaaaaattgacataacttatctacagtaaaacacatgagtctgaggccaggcgtggtggctcaggcctgtaatcccagcactttcggaggctgaggcgggcagatcgcttgaggtcaggagttcaagaccagcctgtccaacatggtgaaaccccatctctacaaaaatacaaaaattagctgggcgtgatggtgtgcgcctgtaatcccagctgcttgggaggctgacgcaggagaaatgcttgcagaggcagaggttgcagtgagcagagatcatgccactgcactccagcctgagcaacagagcgagactccgtctcaaaaaaaacaaaacaaacgccaggcgtggtggctcatgcctgtaatcccagcactttgagaggctgaggcgggcagatcacctgaggtcgagagttcgagaccagcctgaccaacatggagaaaccccatctatactaaaaatacaaaattagccgggcatggtgacacatgcctgtagtcccagctactcgggaggctgaggcaggagaatcacttgaacctaggaggcagaggttgaagtgagccgagatcgcaccattgcactccggcctgggcaacaagagtgaaactccgtctcaaaaaaaaaaaaaagtaaaacttagccaggcatggtgccatgtacctgtggtcccagctgctctgtaggctgaggtgggaggattgcttgagcccagcagcttgcagatgcagttagcagtgattgtgctactgcactccagcctgggtgatggagcagaaaataaactaataatctggttcccaaatgtcaatagtgtcaaggttgagaaaccttgctgtattcattcctcagcccatctcattttcttgatttcaaaataagttgcagacaacagtattcttcagtgcatatacttcacatacccattcttttaaacaggttttaaacagctacttagtgtttcagaatacaaatgtaacgctacttccagaactgattctctacatagattgctccccgtccttttttttttttttttttttttgagatggagttttgctcttgttgcccaggctggagtgcaatggcatgatcttggctcactgcaacctctgcctcccaggttcaagcaattctcctgcctcagtctcccgagtagctgggattacgggtgtctgccacaacacccagctaatttttgtatttttagtagagatggggtttcatcatgttgtccaggctggcctcgaactcctgacctcgtgacctgcccacctcggcctcccaaggccgtatatatatatgggagtttattaagtattaactcacacaatcacaagggtcccacaataggccgtctgcacattgcggagcaaggagagccagtccgagttccagaactgaagaacttggagtccgatgttcgagggcaggaagcatccagcacgggagaaagacggaggctgggaggctaggccagtctctcttttcacatttttctgcctgcttatattctagccacaatggcagctgattagattgtgcccgtccagattaagggtgggtctgccttttccagcccactgactcaaatgtttttttgtttgtttgtttgttttattttattttattttactttaagttctgggatacatgtgcagaacatgcaggtttattacatgggtaaacgtgtgccatggtggtttgctgcacctatcaacccgtcatctaggttttaacccccacatgcattaggtatttgtcctaatgctcccctccccctttgtcccccagccctcaacaggccccagtgtgcgatgttcccctcctcaaatgttaatctcttttggcaacaccctcatgacacccaggatcaatactttgtatccttcaatccaatcaagttgacagtatgaaccatcacagtccttatagatattttctgtgcatctgttccatatcatctgtattagtccattttgcattgcaataaaggaatacctgaggctgggtaatttataaagaaaaggccaggtgggtgcctcatgcctgtaaccccagcatttcaggaggctgaggcaggaggactgcttgagcccaggagttggagaccagcctgggcaacaaagggagactctgtctctaggaaaaaaaaacaattaaattatctgggcgtagtggtgcatgcctgtggtcccagttacctgggaggctgaggcaggaggatcgcttgagcctgggaggtggaggctgtagtgagccatgattgtgccactgcactccagcctgggcaacaaagtcaatcactcaatcacacattcactgtcctacaattatggaaatcagaagcccgaaatgatttcagtgctgaaactgccatgtttgcagtgctgtgtcccctctggaggctctagagcagaatccacgtccttgccttccccagcttctagaggagctctgcaggagccccttctcccttcttcaaagccagcatcctggcatcttgcttccgtcttcacatgaacttctgaatcaatctccctctgcctccctcttataaggacccttgtgatgacatttagggtccacctggatgacccaggataatctctgttctcaaactccttcatttgattacatctgctaaatccctttcctcatataaggtagtattcacaaccccagggattgaggtgtgaatatattttgggggccactcttcagcccacagtgttggtaatttgcttcctatcttaatgcctatttccccattcgagtttaattcctatgagggcaaagatcttcatctgtttaattctccactgtgtccccagcacctaggacagagcctggcacatagtgaataataaataatgaccaaggcaacatggcaaaaccccgtctccaccgggcgtggtggctcacacctgtaatcccagcactttgggaggccaaggcgggcggaccacctgaggtctggagttcaagactggcctgaccaacatagagaaaccccgtccctactaaaaatacaaaaattagccgggcgtggtggcacatgcctgtaatcccagctactcgggaggttgaggcaggagaatcgctggaacccaggaggcagaggttgcagtgagccaagatggtgccactgcactccagcctgggcaacaagagcaaaactccctctcaaaaaaaaaaaatctccacaaaatatttaaaaattagtcaagcatggtggcccacgcctgtggtcccggctacacgtgaggctgaggcaggaggatcgctttctccggggagttcgaggctacagtgagccattaccgcgccactgcactccagcttgggcgacagagtgagtccctgtctcaataataataacaataataaaataataataataataatagtaaagatccactttgtgcactccttgctctggggaatttttctgaaacagtggacagtgtctctatgataactctcaccaccaccaccaccacccccgctttgttttctcagtcagagcactcgatctgggccctttcaactcgcccctcatgctttccgtctgcagcaccccatccaacttcacccaaagcgcccttaagtagtttctgagaggccgtgcctgcaaattcccaattggccacaaggtggaggtgtgggcctgttttcccagccgccacccgtttctagagctggacccctggaacaccaggctctttctagcttccctgcttccgccctagcggttcccaccggcctggaatgccgacttgctcgctctctgcatcccacgggaaaaggagcagaacagaggcttcctccctgactctcctgcccgagcttactgggacctgaatctccccgtgtttagtagtttagcggtttgtgatcaggtcggcctccaccatcagagcagcacactctcgagatggggctcaggcctgactcttttcggggtccccagaatcgctcaacacaattcttccagaagcctcgggatgcgattaaaggattgccagatttttcgaccggtcgttttgtcgaatcatttagttctgggtagcaagaggctgaggaggggagagtgacgtcacctccgcgggtggggcagcaccgctccccgaacccgggggcctcgagctccccaggggtctaggaatccggagggagagaggagaaacaggagatgagatccgggggaatggtatccttgcccccttgaacaggaactggtaaacccttaccaattacggccaacccccactgccacctgtcgctgccgtcgcaacctgtcgcctcccacccatgttgtggctgcgcccgcccccgtcagggcgtgaccacggcgtggattacaacgaccgtgatgctccacggcgccgggagcttttgacggaaggtagcgtaggcgaggggcttcatgggactcgtattacaaaacccctcaccagggtgcgtcctggagaaaaggggtgatacccttcgcctccctcttcctcaactccatgggtacaggcacaaagttttctattattatttttgagatggagtttcgttgttgcccaggctggagtgcaatggtgcggtcttggctcactgcaacctcggcctcccaagttcaagccattcgcctgcctcagcctcccgagtagctgggattacaggcatgcgccaccactcccggataattttttttgtatttttagtagagacggggtttcaccatgttggccaggttggtctcgaactcctgacctcaggtgatccacccgcctcgacctcccaaagttctgggattacgggcgtgagacaccgcgcccggtcacaaagctttctcgttaaaaagtacgctctgaaaagaagcaacccaggcaggttcgctcaatggaaatagtggatttttactgggtagcaggacctccgcgaccacccgctgcgcatgcgcttcacttgggcgtcacccggggaactgcgcctgcgcagtctctccccatccgaggtccgctccgcgagtgcgagcgcgcgccaggcccacccgggcgctgctcttcatgtccccgcggtcgaagacggccacatacgtccccaagaagacgtcaccgaggatccagaagggccctgcaggcggagggacatccagggcctggaaaccggacaagcagaggcggacgccatttcgagtagtctgcaaggcaacaagacgacaactgggtgtcgcggccacaaggacggccatttgcctgggagcccgtccatcccccccaccctcgggttctttgatgttcgccaacaaactgccatcacagggaaaagaaatgtttctgtggccccttcccttcctagtgacgtctctcagctctaccctctcaaaccgtcatatgacgtcactatggcgtcatggtgatggccacctacctggatgacgtaatcatgggccgtgaggttaaaccagacccccccaagaaggaaggagactgcggggagctttgggatttccgagcacaggatgatgtactgggggagaagaggaactagtgaagatgagagattcctgctctgttcagtcccttccgtggctccccagtgccatagggtaatttccctattgagcacctgggtactcagcgtcctgtgtgcagaggccctgccgcctagacttacgcagtcccaagcaaacctgcatgatcgtctccctccacccggccaccatccgcagagtcgcagtgtagacacgtggaaagtgtcctcaattcctccaccaccctccagactatctgtcacgaagtccagtgcctgctgccctggaaagccccttaaatacttgcctcccaccctcaggccctttgatgttcactgtcaaactgccatcagccttcccagcccgtacccaccagactgggacctcacctccccagccagcaaggggattcccccaatggctgcatgcagggcccggatctcctcagtgggtcctgtgatgagggacgtgcccgtatccaggatggcagcacagcccttggcacagagagtcagccctgggcccaccttcacactgagggggaaggaggcagtcatcagaggcagggtcctaggagtccaggcccccagcctccagctccagagccaggagaccaagtccctcaccgctccatgtggatctgccagtaggcagggaccgtgactggcacgaaggtgaggggtgggatgtagtgtgccgggtccgagccccccaggaccagctctcctccatcaggctcttcagggtccctgcaggggcagagtgtagagagtgtagatgtcagtgtcactggccctccctcagccctaggtattgccaggaatggcacttcccaccaactgggttgtttctggagttcctacggggtaatgggatgcaggaagggcctagatgttgggactggaagccgggcaagaaaagcatgatgcttttcttggtggaagctagaacttcctgaagtgaagacgagacttcatttggctgtggaaggtagagttttggggaatttcctgagctgaatatcatagtaaccaagtagagcagtggtgtcttggaattggctcttgaaggtgtgacttgtgcaggggtggggtggcttcctgagtaggagaagagaatttctgaattgcctgttgtgatatctagagaggtgttagacttcctgagttggctgagagcgatgggaacagggatggagacttcctggaaggtggaggagagcaggatctgctaggtggttggtagaactgctagagtgggttggatgtcagggtaactgagtgggcataggattttctgactgtgtgtgacaggcctctgggagggaaagtggagacttcttggaaacttcttggatgttgggtgggacttctgagcataatactgaacttcctagcaggtgagtgggacttcctggattaaatcgggcaattcctgacttctggtcagtgttctcaaatgggatttgagcattctttgtgaggaagagaaagctcctgagtattttgttgggtggggcatggaatttcctagtttgattttgaaacatggagcattctgaactgatggtgggtttccttagtatgtcttaagttgtcatttaagctctgggacttcgaatagggttgaggtgtttctttatagggcaggtgacttcctgcatggaggatgcaacttcttgtattgaatggctgacttcctgaatggacagtgtaagtgggtgactctgagaatgagaattcctgcattgggtcagtgacttcctgaaggaagactctcttccttcttggggataggactcatagataggtgcacacttcccagtacctgttgaggtaaaaggagaagacaggcttatccaatagcccctgctccaccagtacatccatcgggggccgaactccttccacagacagaatgggaaaaccgaggcccaatatcccatcaaaatgggcaaaagcgaagaccaggctgggctcccagagagcctccccgaaaatcactgatgcacccttgattccaccaatctaggggtagattgagatgtgaccagttacttttgggaggacaataaccacatgtcctgaggtctcccaaaccaaggcatgaatcctaggtctggggacttctggatgcaagccccaacttcctaggaaactatgcctcttgagaagccccaccccttcacccaggaacccctttcttctccttgagaagccccacctcttcacccaggaagctcctcccctgcttgagaagccccacctcttcacccaggaagctcctcctccctgcttgagaagccccacctcttaaccttggaagctcctcccccctgcttgagaagccccacctcttcacccaggaagcccctccccctccttgtgacgcaccatcccttcactctgaaaggcaggccctcctccccacttgaaaagccccatccattggcttgggaagctcctcctcgagcctcttcctaagccagatgatcttagacaatggggttctcccaggctcaagacttctgagagtcaaaggccactcacagtcagcttgtcctcgctcaggattccatctacccgcccagttccatattgaatggcaaacttggtcccattggcctggaaggagctagaggctttgggatcaaatcggtggtgtaaccctaggttagaggtcagaaaggtgtcatgggggagggaatctccccagtgcctactgcccctttgactttctgacctgtgagggcatgataaaagaacagttcctcaaaagcctctgagaagctgaggtccagccccgcctcctcccttcacccccattcagccttattctcccacatagaagctcacagcagggcacactgaagaagtggcatctcctggacgggacccagagattggaggagccagtgtcaaaggcaacagtgaagttttgtggaggcgttcccagcccaatttccccaaaatactgcacctgatagcaaaagaggagagtaaacgaagagtttggctcaagggcgcaggggtgagggctgtgtggggctgtgactcacatccctgtagttcgagagaggtacgaagatgggcttgtccccaggggatggggcccccaacttggggagctctgctggttctctccatcccctcagtaggttcaggatcctgcgtccaggttggactcgatgaagagggatgctgtagggaaagaggatattgacaggaagctgcccttcttggagaacctctaaatagacttacccaaataggatatgatgacaaattcaacatctccaaggcactacaatagtagtcagtaccagaaaccctgcaataacaacctccagaaaagcccatcaaagatgccatgatgacaaatatccccaaagactttacaagagcaaaccatcccaaacagacctttccatgtccaaatcccttaaaataagctattcccaaggaattgacattcttaaagatttcccaagaccctaacagaaaacctaacctttgcaaaagcccttgggtggtggcccctgcatgcttcagttcgtgaggttagggactattttccccacccttgaggagaaaaatgtaagcgtcaaatcttaattgtcttgctgtgttgcccgtgctgatctcaaactcctggcctcagcctcctaaagtgctgggattacagaggagagccactatgccctgtccgggttcctttaaactgtatttgcaaaagcaggaggcaaacaggatttggcccttaagctgagtgtttgcaacccttgacttagagggccaattacaattcaggtatcttagttgctaattaagtaggtctaggatggagccgagaatttggatttctaacaagttcccaggtcatgacgatgctgttgatacaacatttggagactcattttctttgcattgacttagaaaatggccatgagacattaggttcaaaaagcaggttaacaagcaccatgtgcggtaatatcttcgttcctgcctttagtcactccttgaagcacttgtcacatcactcacacctttcccgtcaccccccatgagtcagtctttgagaggcacgagaatgtgaagtggggaaaactcttcctggaagtgtacacccctccccctaccaagagttccagggaatgaagacaagagaggagaaaaagagagatgggggcggggaggggacatcagaggtaaggtagtgggaagacttcttgcatagggtccccaagattggatttctttttcttcttttaaactttttatttgaaacagggtctccctctgtcacccaggctggagtgcagtagtgcagtcagggctcactgcagccttgatctccagggctcaagtgattctcccacctcagcctctggagtagctgagactatgggcacaccaccacacctggctttttattttattttattttatttattaattttttttttagacaaggtgtcaccctgttgcccagcctggagtgcagtagcaggatcatagcccactgccccctcgaactactgggctcaagcaatcctccttcctcaccctcctgaactagctgggaccatgggtgtgcaccaccacactgagctaatttttgtattttttgtagaggtggagtctggccatgttgcccaggctggtctcaaaactcttggcctcaaacaagcttcccaccttggacttccaaagtgctgggttacaggtgtgagccatgtctctggccaaaaacatgacttcttcaggccagtttgatgggcgtgatgtgggggagtctcagtttaaatgtcacatatctggggctcgaagatgggaggagtgtgtcacaggtctggaaaccacagtacctaatcatcagagctcatagtagggtctgcagagacctctcaaaaacatgtcctggccaggcgcagtggctcacgcctgtaatcccagcactttgggaggctgaggcaggcagatcacgaagtcaggagttcaagaccagcttggccaacatggtgaaacctcatctctactaaagatacaaaaaaaattagccgggcatggtgactcacgcctgtaatcccagcactttcagaggcaggagaatggtgtcagcctgggaggtggaggttgcagtgagctgagatcgcgccattgcactccagcctgggcgacagggcaagactccgtctcaaaaaaaaaaaaaaaaaaaggccaggcgcggtggcttacgcctgtaatcccagcactttgcgaggctgaggtgggtggatcacgaggtcaggagatcgagaccatcctggctaacactgtgaaaccccatctctactaaaaatacaaaaaattagccgggcgtggtggcgggtgcctgtagtcccagctgcttgggaggctgaggcaggagaatgatgtgaacccgggggacagagcttgcagtgagccaagattgcgccactgcactccagcctgggcaacagagtgagactcagtctcaaaaaaaaaaaaaaaaaaaaagtcctgagaggagggggaggggtcctcaatctagagtctcagtgttgtaagatctgggacttaaaagggctctgggaccggacgcgggggctcacagctgtaaccacagcacttttggaggctgaggcggaaagatcacttgaggtcaggagttcaagacagcctggcaaacatggcgaaaccccatctctactaaaaatacaaaaattagccgggcgtggtggcatgtgcctgtagtcccagctacttgggaggctgaggcaggagaatcacttgaacccgggaggcagaggttgcagtgagctgagatcgccccactgcactccagcctgggtaacagagcaagactctgtctcaaataataataataataataaataataataataataataataataataaaagggctctggtcagccaggcgcggtggctcacgcctgtaatcccagcactttgggaggccgaggtgagcggatcacgaggtcaggggttccagaccagcctggccaacatggtgaaaccccgtctctactaaaaatacaaaaattagctgagcatggtggcgcgagcctgtaatcccagctacttgggaagctgaggcaggagaatcgcttgaacccaggaggcagaggtttcagtgagctgagatcatgccattgcactccagcctgggcaacagagtgagactccatctcaaaaaaaagaaatctggtcttaagagatgtcagagtggagcccttaggggtgacagcctggtttagagatctggaaagctgagaaagaagctctagggatcctgggtgccaagtttggggatcactgaactgggagtcctagacttaaagggcaagaggcagaaaatccctcctaaggttggggtggtagatggggtcaccataccggatcagtgtggccccggaaggctccacattcagcagaggcagcagcagcagcaggggttgcagcagcggtggtggagacatcgctggggacctgggtgtgaacccaggtgtcctggggcctcattttctttcccctgtgactccaccctgttcatgccccacctccaggtttagaaggagaccaggacatgaaatctgtccgcaggtgacgcagtgggacaaggatgttttttgaagatttgtgcagagtatttttgtagggttggcagaagtagcatcctgtgctcctggtgctcctcactccctacttgggtggcagtggtggtggggtctcctccaccgtcaccacctcccacccccccatccttcagctgctgtcagttttacttttaactttcacataacttttctgagacttattaaccacaagtgtttccttggccaagtgggagagaccagcaggtatctgtgaagggcctgggggaagggagaaaggacatgattagacacctgccctcacatatgaagtgggcccgcatttcaggacccagtctcttactgttttatttgtaggtgaagtatgtttcttgttgacaacagatcattgggtattgttttttgtttgtttgtttttgtttttgttttttggtttttttttttttgagaccgagtttcactcttgttgcccaggctgggattacaggcatgcgcaaccacgccccactaattttgtagttttagtagagacagggtttctccatgttggtcaggctggtctagaactcccgacctcaggtgatccgcccgcctcagcctcctaaagtgctgggattacaggcgtgagccactgcacccagctgattctcaattatttcaatctctttgttaaatttatgtgatggaatctgaattccttctgtgtgttagcttgaatttctttgagtttcctcaaaacagctattttaaattctctgtcggaaaggtcacatatctctgtttcttcaaggattggtccttggtggcttatttgatttgtttggtaaggtcatttattctggatggccttgatgcttatagatgttcattggtggctgggcattgatgagttatttatttatttatttatttatttatttatttatttatttagatggagttttgctcttgttgcccaagctgcagtgcaatggtgtgatctcagctcactgcaacctctgcctcccaggtgcaagtaattctgcctcagcctcccgagtagctgggactacaggcacccgataccaccctggctaaattttttttttttttttgagatggagtttcactcttattgcctaggctggagtgtaatggcgccatcttggctcactgcaacctctgcctcctgagttcaagcgattgtcctgtctcagcctcccaagtagctgggattataggcgcatgccagctagtttttgtatttttagtaaagacagggtttcatcatattggtcaggctggtctcgaactcctgacctcaggtgatccacctgcctcggcctcccaaagtgctgggattacaggcatgagccaccgcacccagcctacacccagctaatttttgtatttttagaagagacagggtttcaccatgttgtctagcctggtctcaaactcctgacctcaggtgatcttcctgcttcagcctcccaaaatgctgggattagacatgagccaccatgcctggccatgttaggtatttattgtagtctttgcagacaaggcttgtttgtacctgtcctttttggggaggctttccaggtattcaaaagtacttgggtgttgtgatctaagccatgtctgcattagggggctccccaagcccattaatgctgtggttcttgcaaactcatagaggtactatcttagtggtcttagataagatccagaagatttatctggattaccaggcagagactcttgctctcttcccttgctttctctcaaacagagtcagtctctctctctccctctctctctctctctctctctctctctctctgtctctgtctctctctctctgctgagctacctggagctgggagtggggtgacacaaacaccccatgcctactatcactgggattgcgctgggtcctgcccatggcctcctgtaaccacgacctacctgcctactgcttatgtttgctcaaggcccttgggctctaaaactagcaggttccaaaggcagccatgcttgcatccttcccttcagggcatcaagttacctcaggtcccaggtgggtccagagatacagtcagtgagccagggactggagtcaaaacccttagaaatcggctggatgcggtaactcatgcctgtaatcccagcactttaggaggctgaggcaggcggatcacttgaggtcaggagttcgaggccagtctggccaacatggtgaaaccctgtctctactaaaaatacaaaaattagccaggcgtggtggtcagcgcctgtaatcccagctactcggaaggccgaggcaggagaatcacttgaacctgggaggcggaagttgcagtgagccaagatcgcgctgctacactccagtctgggcgacagagcaagactccctctcaaaaaaaaaaaaaaaaaaaaaagaaacaaaagaaaggctaggtgcggtgggggtgcgtttgggaggctgggggtgtcatcccagccctttggaaggctgaggcaggaggatcgcttgcgcctgggagttggagaccagcctgggcaacaaagggagaccctgtctgtacaaaaaaaatgtaaaaattatctgggcgtaatggcacactcctgtagtcccagctactggggaaggtgaggctggaggataacttgagcctaggaggctgaagctgcagtgagccgtcatcacgccactgcactccatcccaggtgacagagtgagacactgtctcaacagaaataaataaatacataaataatggtaaagatccactttgtgcactccttgctctgggggattttcctgaagcagccgaacgtgtccctgataactgtcaccacccccctttgttttctcagtcagagcactcgatctgggccccttcaactcgccccgcacgctttccgtctgcagcaccccatccaactgcacccaagcgcccttaagtagtttgagaggccgtgcctgcaaattcccaattggccacaaggtggaggtgtgggcctgttttcccagccaagattccccagccgccacccgtttctagagctggacccctggaacaccaggctctctccagctttcctgcttccgccctagcagttcccaccgcctggaatgccgacttgctcgctctctgcaccccacgggaaaaggagcagaacaggcttcctccctgactcccctgcccaagcgtactgggagatctcctgccgaacacggcccggccaatgggacctggatctccccatgtcttgtctctcagggggttgtgaccgagtgggcctccaccatcagaggagcacagtttccagaatcgcccaacacaatctttcccgaatcccctcaggaagtgattaggtaaaggattgccagatttttaaacccgtcattttatttactaaccttgtaagaaaggaattatcgcccacattttaccgggttggggaggggctgctgcggtgcagcaagattaagaggaggcagcccaggtgcacttggaggggaattgaacctggttcttgaagctgcagacaccaagtaatcagcccagatgcctcgcatcgtctttgccaggattacttttgcccctgttccattggtgggaatctgtcacgtggttgctcctggctgcaaggacgacccggaaatgtagtccagttgtgtgtccaagagtgggggaccctttgggtgactctcaggcactgtgggccacatcagaccccacaaggcctcaagttcggacctgcgttccctctatgatcttatatcgcaccttcccgaggtctcgcattagtgttttttttttttttttttttttttttttgaggcagaatctcgctctgttcaggctggagtgcagtggctgtgatctcggctcactgcaacctccgaacccccaggttcaagcgattctcctgccaatttttgtaattttagtagggacggagttttgccatgttggccatgctggtctcgaactcctgacctcaggtgatctgcccgccttggcctcccaaagtgttgggattacaggcatgagccactgcacctggcctactcaaaatattaaacataggccgggcatggtggcttacacgtgtcatcccagcacgttggcaggctgaggtgggaggattgcttgagcccaggagttccagaccagcctggggaacatagtgagtctgtctctacaaaagaattacctgggcttgctagcgcatgcttgtagtcccagctactctggagactgagatggcaggatcacttagcccaggaggtcgtggctgcagtgagctgtgactacgccaccccactccagcctaggtagcagagtgagacactgtctcaaaacaaaacaaaacaaaaagttaaacatagagttactgcatgacccagcaatcccactccaaggtgaaatgaaacatatgtctacacaaaaacttgtacatgaatgttcatagcagcgttgcagccaagaatagaaacatcccacctgtccattaactggcgaatgggtaggtaaaaggtggtatatccataccatggactattactgtgccataaacagaaatgaagtactgatacattctacaaagtagatgaacctagaaaacgttatgcccagtgagagatgccagtcacaaagagctacatattccaacgatccatttataggaaatgtctagaataggaaaattccataaagtcatataattttttctttttttgaaacagagccttgctttgtcacccaggctggagagcagtggtaccattatggctcactgcaacctcaacctcctgggcacaagtgatcctcccatctcagcctcctgagtagctgggacaagaggcattcgctaccctgcatggcttagtttttaattttttgtagagatgggggtgggggtgtctccctatgttgcccagattggtctcaaactcctgggctcaaacaatcctccagcattggcctcccgaagtgctggggttacaggcatgagccacctcactcagccagatatagattaatggctgcctcaagctggaagaaaagggtgggagaattgggtataactgttttttgtttgtttgagatggagtctaggtctgttgccaggctggagggtagtggcgtgatctaggctcactgcaacctctgcctcctgggttcaagcgattctcctgcctcagcctcctgagtagctgggatttcaggtgcctgccaccatactcggctaatttttgtatttttgtagcgacggggtttcgccttgttggctaggatggtctcaatctcttgaccttgtgatctgccctccttggccttccaaagtgctgggattacaggtgtgagccaccgtggccaacgggtatatctgcttatgggaatggggtttctttgtggactgaccaaaatgttctaaaattggttatggtggtggttgcacaacccgtgaacttgctaaaaaccattaaattgtacttgaaagtgctgaattgtttggtgtgtgaaccaaatctcaataaagctattaccaaaaaaattagagaatattgggttacttacaaatgagaaccttggtccacagctaccttcagacaacaaaactgccagtgaccgagtgcttctgtatgccaggcactgcgcttccgggatcctcatacccttcataagaaataagaacaagaggccgggcacggcagcacacgcctgtaattcctgcactttgagaggccgaggtgggtggattgcctgaggtcgggagttcgagaccagcctggccaacatgatgaaaccctgtctctattaaaaatacaaaaaattagccgggcgtggtggcaggtgcctgtagtcccagctagtcaggaggctgaggcaggagaatggcgtgaacccggcaggcagaggttgcagtgagccgagatcacgccactgtactagagtaaactctgtctcaaataaataaataaataaataaataagaacaaagccgggcgtggtggctcatgcctgtaatcccagcactttgggaggctgagatgagtggatcacttgatgtcaggagtttgaaaccagcctgcccaacatggtgaaaccccgtctctactaaaaacacaaaaattagccgggcatggtggtgcgcacccgtgatcccagctactcaggaggctgaggcaggagaataacttgaacccgggaggcagaagttgcagtgaaccaagattgggccactgcactctagcctgggtgacaagagcaaaactcaaagaaaaaaggaagaacgatttatcctatttaccagtaggtcaaccgagactgagtgcaatgtgactcgtcccaaaagtgttgtaattcctcttcagcctatttcaggactcttgcacttttctaacagtggaaacttagaactactttaacagccacaagaatcaatacaggctggatgagaggctcatgcctgtaatcccggcaccttgggaggccaaggtgggcagatcgcctgagtccatgagttcaagaacagcctaggcaacgtggcgaaaccccatctctaacaaaaatgtaaaaacttagctgggtgtggtggctcatgcctgcggtcccacatactctggaggctgaggtgggaggatcacctgagcccaggaggtcagggctgcaataagccaagatggcaccactgcactccagcctgggcgacagagtgagatcttatcttaaaaaaataaataaataaataaataaatataaatacagttccaccatatcaggcacctcatttgaaacccaccctgtttatgcttttacctcatttagtcataagagtaaggcaacaaggtcatactcttgatcccggtgggctaggggaagtccccatatgctggtgtgggacctccaccccagccaatgtccaggctcttgacaccatctcgggaaggaacttgaggacaagtgggaaaatactgaaagtacaaagatgtattgcaaagtgaaaagtacacactcaacaaagaggagtacaggtggactccagagagagtctcctgcagggggggtttggggctgctaccttaatgggtttctctctttttgttttgagacagtcttgctctgtccccaggctggagtgcagtggcacgatcttggctcactgcaacctccgcctcacgggttccagcgattctcctgcctcagtctcctgagtagctgggactacaggtatgtactatggatttctttaatcaaggagtggaatattcatgaagattcctagaaaaaggagatttttgagaactgtggtgccacccacttttacaccaaatatgggtgttcctgtaaccgtcctggtgctggtgggtgtgtgtttatgttaatgagcatataacgaggtcctaggtgagacctaggtcatatgtagggccttgttgggtccaatgtgtcttagccaggttggtccacacctagggttttcaagagtcttatcagcccccacctgctgcaactatttcaacagtttccttttgctagtcatgtgaaactgctgcctggaattttctattctcctgtgactaccctgtgttattcctgtctcgctttttttttttttttttttttttgagatagagtttcagtctgtcggtaggctggagtgcagtggcgcgatctcggctcactgcaacctctgactccttggttcaagagattctcctgcctcagcctcccaagtagttgggattacaggcacgtgccaccacgcccagctaatttttgtatttttagttgagatggggtttcaccatgttggccaggatggtctccatctcctgacatcgtgatctgcctgcctcagccttccaaaatgctgggattactggcatgaaccactgtgcctagcctcctgtctcactctttttaatttttttatttttatttatttgtttatttatttatttattttgagacggagtcttactctgttgccaggctggagtgcagtggcgcgttctcggctcactgcaacctccgcctcctgggttcaagtgattcttctgtctcagcctcccaagtagctgggattacaggcacgtaccaccacgcctggctattttttttgtattttttttagtagagatggggtttcatggtgttggtcaggctggtcttgaactcctgaccttgtgatccacctgccttggcctcccaaagtgctgggattacaggcgtgagccaccgtgccctgcctttatttttttatttttgagatgcagttttgctcctgctgcccagggtggaatgcaatggcaagatcttggctcaccacaacctctgtctcccgggttcaattctcctgcctcagcctcctgagtagctgggattacaggtgcccgccaccatgcccggctaattttatatttttagtagagaccaggtttcagcaagttggtcaggctagtctcgaactcctgatctcaggtgatccacctgccttggcctcccaaagtgctgggattacaggcatgagccaccatgcccggctttctcactcctgtttgcaatttacaggcaaggaaactgaggcacggggaggttaaggaactgggctcagtgttacacaggaaggaagtgacagagacaccaggttctgccatttccaacgctcatgttaatcacttgtttcgcttctaacatccctaggtggaaaattccacaatctcaaacgatgggcctgagtagacataataagttacagaagagcatggatcacatagtcccatttcttttttataaaggcatacacatatgtcagaggcattccaaccacagcgattctgtcttgaataggagcttggtaaaataaggctgagacctactgggctgcgttcccaggaggttaaggcattcttagtcacaggatgagataggataggaggttggcacaagatacgggtcacaaagagcttgctgataaaacagcatatgcagtaaagaagtcagccagatcccagcaaaaccaagatggcgatgagagtgacctctagccgtcctcatggctcattatacactaattataacgcattagcatgctaaaagtcacacccaccagcacgatgacagcttacaaatgccatggcaacgtcaggaagttcccctatatggtctaaacgggggaggaaccctcaattctgagaattgcctacccttttcctggaaaactcatgaataatccacccgttgtttagtatataatcaagaaataactataagtataatcacagtgaacagcccaagccgctgctctacctggagtagccattcttttattcctttatttttattgcattttatttttgagacggagtttcgctcttgttacccagactggagtgcaatggcgcaatctcggctcaccgcaacctcggctcaccgcaacctccgcctcctgggttcaagcgattctcctgcctcagcctctcccgagtagctgggattacaggcgcccgccaccatgcctggctaattttgtatttttagtagagacggagtttctccatgttggtcaggctgatctcaaactcccgacctcaggtgatctgcccacctcggcctcccaaagtgctgggattacaggcgtgagccaccgcgcccggtccgagactgagcttttttaattcttccaatcaccaagttattgaaaccatttttgcaaaattttaacaatgagaaaattctgacatctcaaatctggccaggcacagcggctcacgcctgtaatcccaacactctggaaggccgaggtaggtggattgcctgaggtcaggagttcgataccagcctggcaaacatggtgaaaccccatctctactaaaaatagaaaaattagccggccgtggtggtgggcacctgtaatcccagctacaagggaggctgaggcaggagaatcgcttgaacccaggaggcggaagttgcagttagctgagatcgcggcactgcactccagcctgggcaacagagtgagactccatctcaaaaaaaaaaaagtaaaaataagcccggtgccgcagctcacgcctgtaatcccagcactttgggaggccgaggcaggcggatcatttgaagtcaggagttcgagaccagcctcgccaacatggcgaaaccctgtctctactaaaaatacaaaaaaatgagccgggcgtggtggcacatgcctgtaatcccagttacttgggagggtgaggcaagagaatctcttgaacccaggacgcagaggctggagtgagctgagatcacaccactgcactccagtctggggtgacagagtgagacctctccaaataaataaataaaaataaataaaactaacaagcagcacgactccaaaatcagaaaacttgtaacgaccaaaaaagtgcaaacgtgccttaaatcagtcatgtgcgacaagcagctatagctagggtttggccgcaggctcagagaagcgcatgaatgagctaaagccacaaagcgcggggctggaggtttggctcccaagaagcgaggaaatgggttcggaactcttctgccaagtcccagtagatctacccggtaaacttccggtgagtttccaacttccgtgcggggcagcagcttcggctggtcctaagcggaccggaagttcgtcaagtttcacgctccgcccctcttccggacgtgacgcaagggcggggttgccggaagaagtggcgaagttacttttgagggtatttgagtagcggcggtgtgtcaggggctaaagaggaggacgaagaaaagcagagcaagggaacccaggtaggtgcacccgagagtggggagacgcaggaggagccccgaacccggggcttctcggcgctccccgcgtactccgctctgcccccttctctccttccatttcctcccctcggtaattcgcgcctcccgcggctgtttccagggcaacaggagtagttcactccgcgagaggccgtccacgagacccccgcgcgcagccatgagccccgccccccgctgttgcttggagaggggcgggacctggagagaggtgcgagggcggagcatgaatggaggaggcggggcggggcatgatgggaggtgatggggcgggacctgcagcgcggtgcgggggcggggcatgaagggaggaggcggggctgggggcggggcatgatgggaggagatgtggcggggcctggagcgaggttgtgggggtgcagtaggaagggaggaggcggggcgggggcggggcatgatgggaggggatggggacctggagcgaggttgtgggggtgaggcttggagggagggatgcatatggggcggggcaaggtgttgggaggcccatgatgggggctttaggggctgaacctggaaggttgagggcggagcatagtaggaggaggtggggtcagaatgagaaatagggatgcttggggcagaagtgaggtagagtcttaagaagaggaggtggggggaaactacatggcatggaggccgtgaaggcagagcatgattaaaggagaatgggccctacctagaaaaagcaggtggattggacctgagggggcggggcctacagcaggggcggggcttaagaccaagctgaaggctggcgtggaacagaagggggcaggtcttgttagaaggatggggagggtttgtaggctggcaggaaccagggttgtggctgagagtagggtctttggagagatggaaaaaaaagggaaagccctgtcaggacctgtaactgacctaacctaacccttcttagccccacaaggctctcaatcccctgtattctacaggctgctccgtgaccccaccatgtcctctcctaccacgagttccctggatacccccctgcctggtgagtgactctcttccccacccagcccttatcacacacgagcagaagctcactgtacctctcccggattccaccctcttccaggaaatggcccccctcagcctggcgccccttcttcttcacccactgtaaaggaggagggtccggagccgtggcccgggggtccggaccctgatgtcccaggcactgatgaggccagctcagcctgcagcacagactggggtgagacagggccctggagttgatgtgggggcttggggaggggtttaggaagggagaaagaaatagaaatgggaatgggaggccctgatctttgctttttgttcttgctttctccttaacatatacatctttctaaattgcaatttccctgaatgtgagcagcaactcctctctccctccatcctctggctctttgcctggggatctcctgtgggcccatctctctggttcctgtttctccttgtggctttctcatggcctctacctacccaccccagtcatcccagatcccgaagaggaaccagagcgcaagcgaaagaagggcccagccccgaagatgctgggccacgagctttgccgtgtctgtggggacaaggcctccggcttccactacaacgtgctcagctgcgaaggctgcaagggcttcttccggcgcagtgtggtccgtggtggggccaggcgctatgcctgccggggtggcggaacctgccagatggacgctttcatgcggcgcaagtgccagcagtgccggctgcgcaagtgcaaggaggcagggatgagggagcagtgtgagtgcagcgggagggggcggtgccggcctggccccccgcctagccctggggttctgctgaggcctgcatccccctacaggcgtcctttctgaagaacagatccggaagaagaagattcggaaacagcagcaggagtcacagtcacagtcgcagtcacctgtggggccgcagggcagcagcagctcagcctctgggcctggggcttcccctggtggatctgaggcaggcagccagggctccggggaaggcgagggtgtccagctaacagcggctcaagaactaatgatccagcagttggtggcggcccaactgcagtgcaacaaacgctccttctccgaccagcccaaagtcacggtactgccccctccacaaccttgagtgtgacggtcccaatggggtagagccagctgggccatcacccagggtgtgggagaatgaggctccagagggcaggggctttgggaagaggatcccccagggtgcaggcttggcctcaaggtggccacccagacttaggctcacaaagacctgggagtgaccctggtctcctgtgtcccagccctggcccctgggcgcagacccccagtcccgagatgcccgccagcaacgctttgcccacttcacggagctggccatcatctcagtccaggagatcgtggacttcgctaagcaagtgcctggtttcctgcagctgggccgggaggaccagatcgccctcctgaaggcatccactatcgaggtaatggtccatctgcccacaaggaaccccagagatagctccaggacagatgctgggagcagagttaaggaagaccagtgcttgccgttgtaggatgacattccacggcgaatagagtcttctatgagccaaggagagaaaggaaaaagggtctgaggctgagaaaattgaggatcaggctagaggcgctattgcagagaaaagttgccaaaaaggcttttcagaggagttagcatttgaatcaaagtagggataacatataagtattgagcacgtgctgtatgccaggctctattccaagtgttggcatatggggcaaagaacaaagcagatcaaaccccgtgccccaaaccttgtgctcacctggggaaagagtatcctaaggagatggggatgcagcatgtgcggaagcctgaagtggagaaagagctcgggctgtctcacgtgatggctgcacgctggtgtggctgagagaacaggggggaaggggacaagggataatcctggtgagattagacccccatttgggccaggaggggagggactagcagctgaagggtcacagggctcaagctccccctcccgctgccgcccttagatcatgctgctagagacagccaggcgctacaaccacgagacagagtgtatcaccttcttgaaggacttcacctacagcaaggacgacttccaccgtgcaggtagggcccaggggaggcttcggggaggcttggcgcccctgctggctggaagacctggggccaactcatccctgttggagtctctgtttctttatctccaaagttggggtgagggttgagccaaggtgagagtgaggtaagagtgcatgtgccacgtgtggtggtgcacgccaatagtcccagccactcgaggctgaggagggcagattgcttgaggctatagtgagccgtgattgtgcgacggcattccagcctggtgacagagaagaccgtgtctctattttttaaaaaaagcatgtattgagtgccgactctgtacattgggttgcagtggaagttgagatgggaggagccctgttaccacatcaggcatcttggtgggcattaggaaaagcattccccgcccccgccaaaacgtggtctcacccaagggaggcgggctggagctcggtccattgtgaagcgggcagccttctttactgtctaggggagcactgcttcctgccctctgagagcgctaacctgcgtgggtgggcttctggaagaaggcctgggcagtgagaggcactgcctaggaaaagggtgggaggagcattgctagtgctgcagagcatgcaccagggcctcgctccctcattgtcccacaatctctgggggacctctctgtatttcccgacatctgtccaaaccccaccctctccccttcctcttactccggccctttcaccacccgagacggtcccagtaacccttttagtatgagcttagcagggcagggctgcagggaagcgtttctggcagaggagattggcgattgcagaggccctgaggttggggagagctggtggtttggaggaactacagggaggcccaggcagctggagcacaaggagatggggtggagaggaggtcgggaatcccaccctaccccttcccagccgctcctctgccaccaccctggaacactgccagggtccccttgaggggccgcctgcctccacccctgcctgatggggctgctcacagcacaggcagaagggtcctgtcagcacttaaggctgcccacttccctcctccgctcagaaccctccgcggctcccgtctcactgggagaagagctagagtcctctctgtggcccacaaagccctttaggacctggcctcgctcactctctgccctcagctctcaccctctccccctgttccagccactctggcctcttactggcacccatccagcatgctgcagccaagggcctgtgtacttggagtttcctctgcccagaactagggggaccaactggtcctagtttgcccaggaccttcccagttttaacactgaaagtctcatggcctgggtagcccccgtcccaagtcatgggaacagcagacgttggtcaccctcacaatccctcatctccttcggattggtcactgctccagcgtcacccagagcgcagccttccctgcccgccttgtgtaaaatagaaccatggctcagcagggcccttcacacttctctgcactgcctggttccattgaactcacagccctctgacaggctgggcctcttcctaatgtgtttgtctatgaccggtcccctaggctctcaaatgtaagtgctggagcctggcacgtggcaggtactcagtgacatttgatgactgaatgaacaagtcagttttgggaatgagtttgggctttaccttgagcagtggaagccagcgctgggaccagcacgatgtgacctaggttttaaaagcttccctttgcctttgtgaaggggacaagaatagggactcgggaagctgcagccaccgcccaggtgggaagggagggtggtgataggatagtagaaaatactgaagaaacatgcaccctcattcattccttcactgggcagcatgtgtggcacacctactacatgccagcactcatgggcacggggcacaggtggacagaaatgacaagaacgctgtaattactgctgtgttcccagccccagagactgtgggcagcgccagggtccaggatgtggggcacggtttcgggctgagggagtcacgggctgcctcccgccccgcaggcctgcaggtggagttcatcaaccccatcttcgagttctcgcgggccatgcggcggctgggcctggacgacgctgagtacgccctgctcatcgccatcaacatcttctcggccgaccggcccaacgtgcaggagccgggccgcgtggaggcgttgcagcagccctacgtggaggcgctgctgtcctacacgcgcatcaagaggccgcaggtagggccccgcagagcctctgcgcagagccaactacgtcccgcggcccacgtggtccgttcaggctgggttctgccagccacactgccctcccctccgcagagtctttcctcaggccccaccctgctcgactgggagccaggtctagtccaagcacagaggcgggccccacgctggctcccacgcctggtcggggaggggccctcctttctgttggggtgggcctcccaaagcctggcagggcaggggctcagccagcgcccacctgcctcctccctcaggaccagctgcgcttcccgcgcatgctcatgaagctggtgagcctgcgcacgctgagctctgtgcactcggagcaggtcttcgccttgcggctccaggacaagaagctgccgcctctgctgtcggagatctgggacgtccacgagtgaggggctggccacccagccccacagccttgcctgaccaccctccagcagatagacgccggcaccccttcctcttcctagggtggaaggggccctgggccgagcctgtagacctatcggctctcatcccttgggataagccccagtccaggtccaggaggctccctccctgcccagcgagtcttccagaaggggtgaaagggttgcaggtcccgaccactgacccttcccggctgccctccctccccagcttacacctcaagcccagcacgcagtgcaccttgaacagagggaggggaggacccatggctctcccccctagcccgggagaccagggccttcctcttcctctgcttttatttaataaaaactaaaaacagaaacaggaaaataaaatatgaatacaatccagcccggagctggagtgcaagatggagagggcgcgggcttctagggacctcagtgacactgggtgcccgaacctgattgagcaggtgggactgggtgtccccaggctgttgggaaaagggtggcacatagggtcccagtgttgggtggtgtgtcgcctgctgtgaaagttcaggacagaggcctcagcctcagggtcacctccctggacaaggtgaatcagaactcacccttgaaggataaacaggatttaagtgaatgaggggacctggacttctgtccgaacaacaagtgtttgctgaggcctcctgtgggccaggcactgggttggccattctagagatggagacattcacccaataaatgtttccagagcattaactacagttaggcacaattctaggcactggaaacatctgtgaacaagataaccatcctcctaccaagactcgggggatagggactttaatgagcgtggcactgtggtggggctagaggaaatcagggaaggtatcacaacagaggcaatcgctgggacctaaaacaagagcctgggggctgggcctccaagttgagggaacagcacgtgcaaagtttgaaaggagagacgccaggagttcggagcgaagcgacgaagttcctccaatccttcctgcccctgtgccagccctgaaggagctgaatgagcaattccaatcgagggcgaaaggggggttggatggagggatgcaacttaaaggtgtatttatttggggcggggaacagcggaagtgagagtagttaccaatgatcaccttatcctaagagtagtgtaccgggcgccccacaagtgtccctatcatgcgttgttgagtctaatttacgtatagggaaactgaagctaggatgaaggagaacagatcaagccaggactctaccgcttatcggccagcctctgcggggatcttgggcgtcaggtcaccagctggctgctgggcagcgacggggcagcgctccctacacggccccgggcgagaggcgggcggggggacgcggaggatgcgcgcgcaacacccgagggtgggaggagagagaacagaaccgcggcgcgcccagaccgcacgaggtcgtgaaggtagccgcgcggaggggcgtggcttcgggcagacaggtcatggggaggcggagttaagggaatttttcagcaagggggcgaggccacttcggaagctgagagagggggcggggcctgccctgcagtcgaacaagcggggcgtggccttgcccgcacttgggcaggcgggggcgtggcccgtctctgagcgccgcggctctgggcttgcgcgcgcgggagtcaggggtcacggcggcgtaggctgtggcgggaaacgctgtttgaagcgggtgagtagaggggaaaaagggagttcggggcagtgggcctggtagggaacggggcttgagcagccaggcacatagatctgagagacggttgcgagggcaccctttggcccgggggcgcgcaggagagggcaggggccaggggtttcctgggcgagggcgcggggacgagcaggaaaaggccggggtgggggtggaattcctcggcgggcagggggcgcatgcgccgggcaccgtggggcgggacgtggcccgggaggagctggggggactgggtggtgcacgtgcgggcttggtgtcatcctggattcgctgggtgtttgagtactctgtgccaggcacttttctggaagcaggaacaagtcagagaagtccctgtctcgggaagacagacggtagacaagtgatgagttttaatagatcagtaaagcagtgctctggggctgtgagatgctctcagaaggaaactaacgcagggtaacgtgataatgagcgaagagcctgttgctttagctggagtggtccagaatcgaccgctctgggaccctcaagtgcaaagccctgaggtggaaggagcttggcgtatttgtagcaggagccgaggggacgagagaaacacagatgaggtcggagtcatgatggggaactagatcctatagggccttgtaaaacttggtatggaatttctcctttattctaggttcagcggggagccgtgggagggtttgagcgtggaaacaacacgattcgccccatgttttgaaaaactcaccactgagtggaaattggattgtagcaggaataagaatggaaggagggagatctgttaggagggagagcgtcctgcaggcagagaatcaggctccggttacctttgcgggcggagacagggggactggctgatggactgggcgtaggagcaaggggaagagtccaggatgactcctgggtttgtggtttgagcagcaggctggatggggaaggctaagggagaagcaggttggggttgccgctctgaaggcaaagattagtgggggagtgagtgggcagggtttagagcggagccaggagtgggcagggcgatgtcagtgcctcgcctcagcccttccactgaaggaacttgttgccactgtcttctcttttttttttttttttttttgagacagagtcttgctctgtcacccaggctggaatgcagtggtgcaaactcagctcattgcaacctccgcctcccgagttcaggcgagtctcgtgcctcagcctcctgagtagctgggattacggcacccactgccatgcccagctcattttttgtatttttagtagagatggggtttcgccgtgttggccaggctggtctcgaactcctgacctcaggtgatccacttgcctcggcctcccaaagtgctgggattacaggcgtgagccaccacgcacggccgcttctcctccttcctgcacttcccccccacaggtctctcttccccctagagaggttccttccctccccctgaaatgctcttccctctcttatgtgtttctgacagctgctgtttggacaggccctctgctgagcactggggagccaatgatcattcagtttggttggggaaggacaggagatttcagtccagagtgcgctgagctatggcggagcagtgatagtctttgggagccaagagaagaacctgtgcgctcagggaagactcaccagagtggttgatattcacagggagtttcaactcacatgtctttttttttttggtttttgagacagggtcttgctctgtcgcccaggctggagtgcagtggcgcgatctcggctcactaacctccacctcccgggttcaagcgattctcatgcctcaggcttccgagtagctgggattacaggtgtgtgccaccacgcccagctaatttttgtatttttagtagagacagggttttgtcatgttgcccagactggtctcgaatccctgacctcaagtaatcctcccacctcggcctcccaaagtgctgggattacaggtgtgagccaccacacccggcctaaactcatgtcttgaagtaaccggacactgtgcagagtgatgctggagaccccaacttgggcaagatgctgactccttttctcaaggagctcacaggctgaaaggatcccagctctgcattgtgcaataacgaaagtggcacaaggcgttgtgggaaccctgaagggcagctggtcagcttggaggagctaagcctgagctgagtctctggatgcagtggagtttcatgcagcgaacactgcctaaggcctcctgggggcccaccctgtgctgggtgatgctaaggtcccagaggagagtcagtccttgctctgccatccagaggtccctggctggtaagggaggaagacacacacccaggcagtccagagacagcagtcacagaggcctaggggaaggacaaggccgaaagcatgcaggtgagcctgggcaacatagcaagaccctgtctctacaaaaaatacaaaagctaggccgggcgcggtggctaaggcctgtaatcccagcactttgggaggccgaggcgggcagatcatgaggtcaggagaccaagaccatcctggctaacacggtgaaaccccgtctctactaaaaatacaaaaaattagccgggcgtggtggtgggcgcctgtaatcccagcactttgggaggccgaggtggacggatcacttgaggtgaggagtttgagaccagtctggcagacatggtgaaactctactaaaaatacacaactagctggacatggtgggcgcctgtaatcccagctacctgcgaggctgaggcaggagaatcacttgagtccaggaggcggaggttgcagtgagcaagatcctttcccaaaaaaatatataaataaaaataaagctgtgagattgggcaagattggatgaggtcattgaggaaatgagtgtctcactcatcgagaaaactggtgtctggcctgcagcgagcacgtggtgtcattttgttgctgaatctctgttaagtgcttgctaccgaagggtcgtgagaggggcagaggacagtgtttgccaagctctcatcctgtgccagggccaatgagaggggacacacaggggcctttccttcctaatgctgctgtgcctccactaacaagagcccaggttttgcccctggtgacaccgtccctcccaccgcacccccgcagccacagccaactgaccaagggcagccagtcagctccttccttcctcctccagcttcagcactgactctgggctcccacaagcccctgcgcttcctctgtcccacccgggtctctcctcgcagatcatcactccctgtccctctctggctacttgcacaacccgaagccagagccgctaacgacgcttgcttcttcctgtaagtcacacatgtacgcggttgtcacccaaagagcacaaacgcagtcaaagtcttcctcacacaaaaccccctgcacacgctcacggctgcaccactcacaaaaggtggaagcaaccctaatgtccatccactgatgaagggatacgtcagacgtgttctagccatacagcggaaaagtactcagcaaaaaagggacacagcactgacgaaaggccgccacacacatgagcgatgaacacattcagagaaagcagccagacacaagaggctgcatattccaagatcccatttataggaaatgcccagaataggcagatccatggagacagaaagttagatgagtggctgccaggggtgggggcagatgggctgaatgcagggagagagctaaaggatttaggctttttggggtgatgagagagttctaaaattgactgtggtgatggttgcctaactctgaacatactaaataccattgaactatatatactttaaatgggtgaattgtatagtatgtgaattatagctcaataaagcagttagcaaatgaagtcttctaccctgtcccccaggaaaccagtttcttagctctccttatagaatgatgcattaaaagcaaatagatttatacatatgccctgcattacaataaaaaagacgtctacatactccctgcattacaataaaaaagacgtctacatactccctgcattaaaagcaaaaagatttctacatactcttctgcccaccttgtaaatttgttactattttcattttatatatttcccccttaatattttgaaaagtttcaaacctgcagagaaggtacaaattgagtacagtgaacagccatggccctttgcctagattcactggctgttggcatgacacctcatttgctttatgctttatccaagcacatgcatatacctgtaccttttgtcctttttttggctgaactatttgaaagttgtggtcatcatgatacttcacctctgaaaactccagcagttaactctttttttttttttttttttttttttgagacggagtcttgctctgtcacccaggctggagtacagtggtgcgaccttggctcactgcaacctctgcctcccaggttcaagcgattctcctattgcagcttcctgagtagctgggactataggcgcgcaccaccacatctggctaatttttgtatttttagtaaagatggggtttcaccatctttgccaggctgctcttgaactcctgaccttatgatctacgtgcctctgcctcccagagtgctgggattacaggcatgagccaccgcacctggcctctttttttttttttggtacagtattttactctgtcatgcaggttgtagtgcagtggggtggtcacagctcactgcagcctcgacctccccaggctcagctgatcctcagcctctcgagtagctgggactaaaggtgtgtgccaccacaccctgctaatttttatattgtttatagagacagggtgtcaccatgttgcctaggctgatctcaaactcctgggttcaagcaatccccctgcctcggcctccaaatgtcctgggattacagccgtgagccaccgtacctggcctccagcagtcagctcttaagaacagggatgtccgcctgcagaactacagtgtcattgtcatcatcatgcagtttaacatgagacagtgacgttattgaatagacgattcttatttagatctgccacgtgtccctgtaatattcttcaaggctataaataatttcttattttttttttttttccaagactgagtcttgctctatcgcccaggctggagtgcagtggcactatctcggctcactgcaacctctgcctcctgggttcaagccattctcttgcctcagcctcccgaatagctggaattacaggcatgcaccaccacgcccggctaatttttttgtattttttgtagagacggggtttcattttggccaggctggtctcgaacccctgacctcaggtgatccgcccgccttgggctcccaaagtgctaggattacaggcgtgagccaccatgtccagcctgtttttttttttgttttttgttttgttttttttttcttttttgaaacagagcctcattgtcacccaggctggagtgcagtggtgcgatcttggctcactgcaacctccacctcccaggttcaatcaattctcctgcctcagcctcccgagtagctaggattacaggcgcctggcaccacgcccagctaatttttatatttttagtagagacagggtttcaccatgttggccaggctggtctcaaactcttgacctcaggtaatccacccacctcagcctctcatagtgttgggattacaggtgtgagccactgcgcctggccaataatttctttttttcttttcttttcttttttttttttcaagttacatgaagtaaatttattatttacagctaggcaacaagggaaaaccgaagcataggattcattgtgagccaatctcccgagactcaggaaggttgccccgggaggatggagtctcatttgtgtgtaccccatttgtacctggaaagcagaccatcttgggttttatattctggaggcaacatgacatgttgggctaaaatgatgaaggacatcctgtttctaggagggactggaacagagcctgggctgtttcagccagtccctccttatctcaggatattgcattcctagcacattctacagttattcttgagaactattttttttttttttttagtatttattgatcattcttgggtgtttcttggagagggggatttggcagggtcataggacaatagtggagggaaggtcagcagataaacaagtgaacaaaagtctctggttttcctaggcagagggccctgcggccttccgcagtgtttgtgtccctgggtacttgagattagggagtggtgatgactcttaaggagcatgctgccttcaagcatctgtttaacaaagcacatcttgcaccgcccttaatccatttaaccctgagtggacacagcacatgtttcagagagcacggggttgggggtaaggccgtagattaacagcatcccaaggcagaatttttcttagtacagaacaaaatggagtctcctatgtctacttctttctacacagacacagcaacaatctgatctctctttcctttcccatttcccccttttctattcgacaaaaccgccatcgtcatcatggcccgttctcaatgagctgctgggtacacctcccagacggggtggcggccaggcagaggcgctcctcacatcccagacggggcgtcggggcagaggcgctccccacatctcagacgatgagcagccgggcagagacgctcctcacttcctagacgggatggcggctgggaagaggcgctcctcacttcccagactgggcggccaggcagagatgctcctcacttcccagacggggtggcggccgggcagaggctgcaatctcggcactttgggaggccaaggcaggcggctgggaggtggaggttgtagcgagccgagatcacgccactgcactccagcctgggcaccattgagcactgagtgagcgagactccgtctgcaatcccggcacctcgggaggcccaggcgggcagatcactcgcggtcaggagctggagaccagcccggccaacacggcgaaaccccgtctccaccaaaaaatacaaaaaccagtcaggcatggcggtgcgtgcctgcaatcccaggcactcagcaggctgaggcaggagaatcaggcagggaggttgccgtgagccgagatggcggcagcacagtccagcctcagctcggcatcagagggagactgagaggggggagggggagggggagggagagggagaggtctttttttttcccactcccccgctcttgttgcccgggctggagtgcaatggcgcaatcttggctcactgcaacctccgcctcccaggttcaagcgattctcctgcctcagcctcccaagtagctgggattataggcgcccgccaccatgacaagctaatttttgtattttttttagtatagacggggttttcaccacgttggccaggctggtcttaatctcctgacctcaggtgatcggcctgcctcagcctcccaaagtgctaggattacaggcgtgagccactgcacctggcccatcattttacttttttaatccaagttctaacctaggataacacacattgtcatggcaactttttcattttttaagacatgtcttgctctcttgcccagactgtattgcagtggtgcagtcatggctcactgcagccttcacctcccaggttcaagtgatcctcccacctcagtctcccaagtagctgggactgtaggtatgcaccaccatgcttaagtaatttttaattttttgtagagattgactaatttttaattttttgtagaaatggagtctcaccatgttgcctaggctagtttctaactcctggcctcaagtgatcatcccacctcagcctcccaaagtgttgggattacagacgtgagcctcctagcccaggcaacttactttttcatgacatcgacagttttaaagattacagaccagtgttgtcacccctcaccttggattcgtttgtttctttttcttgttttgttttgagacagagtcttgctctgtcacccaggctggagtgcagtggcgtgatcgcagctcactgcaacctctgcctcccaggttcaagtgattctcctgcctcagcctcccaagtagctggtattacaggcacccaccaccacgcctggctaatttttgtattttagtagagatggggtttcaccatgttggtcaggctggtctggaactcttgacctcaagtgatccaccctccttggcctcccaaaatgctgggattacaggcgtgagccactgcacccaggctgtttgtttcttaatgactagaatcagggtaaacgttttcttagacattgtttttcaacacaaaagataaaattgtgagtgcaccactgtgcatcttgctttatctactgaacaatgcctctttgagaaccttccctatcagtacacaaagagcttcctcattcctttacacagttgcatagtattccattgaacggacttaacatatttaaatagccccctgggggaggacagttaggtggtttccagtccttggggatttcaaacgatgcttccggaaataaccttataaatgcagtttttcttatgtgataatatatctacagtgtacgtccctagatgtggaattgagcctccaaacttttatgtttataattgaggtggcatttacatggcgtgccatgcccaggtctccagtgtacagtcagctgtatagtgtgttttatcaccccagaaaccccctcatacccttcccagtctctcctaccctaggagcagccactagtctgatttctagcgctgtagatcactttagtgtattctacaactttgtctaaatggtattgtacaatttttatggaggtaaaattagccattttaaagcaaacaatggctgggcgtggtggttcatacctgtaatcccagcactttggggaggccaaggcaggcagatcacttgagcccaggggtttcagaccagcctcagcaacatggcaaaacccgtctttaccaaaaaacaattggctaggcatggtggcacgcatctgtcttcataactactcaggaggccaaggtgggaggatcacctgagcccgggaggtcaaggctgcagtgagctgagatcatgccactgcactctagcctgggcaacagagtgagatcctgtctcaataaagagagaaagtaataataaagcaaagaattcagttggtacgttcacagtgttgtacaaccattacctctgtctagtttcaaaacatttcatcacccctacagaaaaccccatactccgtaagcagtcactcctcattcccccagtgtgcactttgccttctgcacagcctgctttcaagattcatccgtgttgcatgtctgtcaggagctggcccctctctaatgctgagtgtctgttatgaacctccctgaacatttctaacatatactccatcagttcagaatttttccatgcttatttcaggtctaagctgttgtaccaaggagcccccaaaacacagtggcccaagaaagatacaaattgatttctccacataacgctttggaagataggcaagtgtgcagggttggcagacagctttgctctggaaggttgttggggagcccagtgttgtccctgtccttgtggttggctctcccactacatccatgttccagccactgtgacggggaagagggtgggaggatgtcccagtagctgcacacctcatgatcactctcattcctggagggagaacttagtcacgtggccctcctggcagcgcacactgggaaatgtagcctttggctgggcagcctgtggccactccggacacgcagggttggaggggtgtgttctattgcaaaaaagcaaagcaaagccgggcgcggtggctcacacccataatcccagcactttgggaggccgaggcgggcggatcatctgaggtcaggagttccacaccagcctggccaacatggtgaaaccccatctctactaaaaatacaaaaaaaaattagcgggtatgatggtggacgcctgtaatcccagctactcgggaggctgaggcaggagaatcgcttgaagccaggaggcgaaggttgcagtgagccgagatcagccactgcattccagcctgtgtgaccgagtgagactccgtctaaaaaaaaaataagtaaaataaaaaggcaaaatgaggactggatatggggcaaccgttatgagatccagggatagacagctgacctgctcacctgcctcttcccagccgcatctaggatctgccctaggttccagtaatcccctctgtctcagcctggaccctgggggacaagtactttgtttttgtttgtttgttttttgagacagaatttcacccttgttgcccaggctggagtgcaatggcgcagtcttggctcactgcaacctctacctcccaggttcaagggattctcctgcctcagcctcccaagtagctggggttccaggtgtgcgccaccatgcccagctaattttttttttttttttttttagtagagacagggtttcaccatgttgataaggctggtctcaaacaactgacctcaagtgatccacccgcctcggcctctcaaagtgctgggattataggtgcgagccacggtgcccagctgggtacaggtactttttaaaaacttctttctctgacaatttcaaattaacaggaaggttgaaagaataaatagtgtaggccgggcgcggtggctgggtacaggtactttttaaaaacttctttctctgacaatttcaaattaacaggaaggttgaaagaataaatagtgtaggccgggcgcggtggctcacacctataatcccagcacttcgggaggccgaggcgggcggatcacgaggtcaggagattgagaccacagtgaaaccccgtctctactaaaaatacaaaaaaattaggcgggcgcagtggcggacgcctgtagtcccagctactcaggaggctgaggcgggagaatggcgtgaacccgggaggcggagcttgcagtgagccgagatcgcgccaccgcactccagcctgggagacagagcgagactccgtctccaaaaaaaaaaaaaaatagtgtaaagaacacctgcacgccctttgcccagatcacctgtttcaacattctgtcctatttatgatttgcatggatgtttcttatctcccttctctctgtatacgtacactcactttttacaaagaattcccaataccttgcagacattatggccgtttactcctaaatacttgagtgtgtatctccttagaatattcttattgaaccacaataaagtcacccacttaagtttaacctgcatataaccttgtctaatcaaccagaggatatatactttttttttttttttttttttttttgagacagggtattgccatcttgtccagtccagtcttaaactcctgggctcaagcgatcctcccaccttggcctcccaaagtgctgagattacaggcataagccactatgcccagtgaacttttttgttgtggttgtttttttgtttgtttgtttgggttttaattgttgttgttggtggtggtttttttttgtttttttttttgagacagaatattgctgtgttgcccaggctaaagtgcagtggcgcgatctcggctcactgcaacctccacctctcgggttcaagtgattctcctgcctcggcctcccgagtagccataattacaggtgtgtaccgccacacccagctaatttttttgtatttttattaaagatagggtttcaccatgttgaccaggctggtctcgaactcctgacctcaagtgatccacccgcctcagcttcccaaagtgctgggattacagcgtgggccaccgtgcctaactctagtcaacttttatattgtatatcttgtacattgtatatcttgtcaaggatattgtatatcttgtcaaaatacacccccaaaataataatatatatatatattttttgagatggagtctcgctctgttgcccaggctggagtgcagtggtgcaatctcagctcactgcatgctctgcctcctgggttcacaccattctcctgcctcagcctcatgagtagctgggactacaggcgcccaccaccatgcccggctaatttttttgtatttttttagtagagacggggtttcaccatgttagccaggatggtctcgatctcctgacctcatgattcacctgcctcctaaagtgctgggattacaggtgtgagccactgctcccagcctccaaaataatcttttataggttgtaattaagaaaacacaggccaggcttggtggcttacgcctgtaatcccagcactttgggaggccgaggcaggtggatcacctgaggtcaggagttcaagaccaggatggccaacatggcgaaaccctgtctctactaaaatacaaaaattagccaggcatggtggtgggcacctgtgatcccagctactcaggaggctgaggcaggagaatctcttgaatctgggaggcggaggttgcagccaagatcgcaccactgcactccagcctgggtgacagagcgagactccatctcaaaaaaaaaaaaaaaaagaaaacacaggccaggcttggtggctcacgcctgaaatctcagcactttgggaggccaaggcaggtggatcacttgaggtcaggagttcaagaccagcctggccaacatggtgaaaccccgtctctactaaaaatacaaaaattagctgggcatggtggcgcgtgcttgtaatcccagctacttgggaggctgaggcagaagaattgcttgaactgggtcccgggaagcggaagttgcagtgaatcgagattgtgccactgtactccagcctgggcaacaagagtgagattctgtctttttttttttttttttctgagacggagtcttgctctgtggcccaggatggagtacaatggcacgatctcggctcactgcaacctccgcctcccaggttcaagcaattctcctgtctcagcctcctgagtagctgggattacaggcgcctgctacctcacctggctaatttttgtatttttagtggagatggggtttcaccatgttggtcaggctggtctcgaactcctgacctcgtgatccgcccaccttggcctcccaaagtgctgggattacaggcgtgagccatcacacccggccctgattatgtctttaaaagaaagaaaaagaaaacacaaatatatataagtagcagtctgtatgtgttttgtgttgtgttttgtttgctactgtgggtcctggactcggggagaaagcaggttactataaacggcattttggagacagttggagaaattgggaaaggtgccctttattttatatcaaccttgagtcagtgttaaatgtcctagattgtatcgtactgtgctcggtgaaaggaattccttattgttaggcactacgtgctaacatgtggaggggtatgggatctgcaaggaactctcaaattactcaggaaaagaagtaacaatatgatgtgcataccgcacatgtgggagggcagagagaggcggtgagagagcacacacacgacacgctgaccaccggggagcctggggaagggcatacaggagttctaggcatttgagattatttcaaagtatttaggttggtgcaaaagtaattgcagtttttgtcatttcaatggcagatggcctgggcagatgggtggttggtaggcgaggtatcggagacagaggtttatggaaaataaagagatgtgccaaggccgggcgcggagactcaggcctgtaatctcagcactttgggaggctgaggcgagtggatcacctgaggtcaggagttcgagaccagcctggccaacatggcaaaaccccgtctctactcaaaacacaaaaattagctgggtgtggtggtgggcgcctgtaatcccagctactcgggaggctgaggggagaatcgcttgaacctgggaggtagagcttgcagtgagccgagatcatgccattgcactccagcctgggtgacaagagcacaattccatctcaaaaaaaaaaaaaaaaaaaaaagcaagagatgtgctaaggacctagtgtgatgggagagagggtcggggagtcgacggggctgctgctgcagtagctaacaattgagcgtctggaatgtgctcccaccccactgcctgcagggtgcagagagctatgttagtacagccagtccagagtaggaaaaggctcgtggtcatggtgggtgcatgggatgccatggagacagggtaagaggtgtctccggtcagaacctccaccaagctccaacttgcccagcaggatggatggcaagcggcggccaggcccagggcccggggtgcccccaaagcgggcccgtgggggcctctgggatgatgatgatgcacctcggccatcccaattcgaggaggacctggcactgatggaggagatggaggcagaacacaggctgcaggagcaggaggaggaggagctgcagtcagtcctggagggggttgcagacggtaaggcttggagttggaggttcctgctgcccaacccattgcccctggtcttgcctttggtccaagagtcagctgcaaagctgacctgtgaccccactctggccaattttgaatcctacaaaggactgcccttccaccccgtgcagcctgtgtggcctacagtgattctggccctgacccttgaccctcattctcttccaagtttcctgcctgacccagaccaccacctctgcctggctcctttcagaaccacatgccatcctggccggggaagaccatgactccatgtactccacttccttcccttcccccaccagggcaggtcccaccatcagccatagatcctcgctggcttcggcccacaccaccagcgctggacccccagacagagcccctcatcttccaacagttggagattgaccattatgtgggtgagtttaggggttatgggtgagtgctggggccctgcgctcctggggcagaggccgggccaggtcagcccctctggccctgtgctcctggggcagaggccgggccaggtcagcccctctggctctgcccctctggttgccatagagctgtagtgacagaacagaccagtgggtgccaggggttgtggagtgcgaagcgaaggtgacacagggtcagcttgagggaggtgcttggagcgttgatctgttttgcatacgtagtagctgcagcctgtgcaaggacctctgtgccttaaaattcataacaccagacacataaaccaaaagtcaatttgacttcttttttttgagatggagtcttgccctgttgcccaggctggagtgcagtggtgtgatctcggctcactgcaacctctgcctcccgggttcaagtgattctcctgcctcagcctcccaagtagctgggattacaggtgcacaccaccatgcctggctaatttttgtatttttagtagagatgggcttttgccaagttggctaggctggtcttgaactcctgacctcaagtgatccacccgccttggcctcccaaagtgcttagattacaggtgtgagccattgtgccagcccaatttgactttttaaaagattttttttttttttttttttttttttttgagacaagattttcctctgttgcccaggctggagtgcacctggccaataattttttttttttttttttttttttttaagatggagtcttgctcctgtcgcccaggctggagtgcagtggcacactcttggctcactataacctccgcctcctgggttcaagtgatccttcttcctcagcctcccaagtagctgggattacaggcgcccgccatcacgcccggctaatttttatatttttagtagagacagggtttcgccatgttggccaggctggtttcaaactcctaacctcaggtgatctgccgaccttggcctcccaaagtgctgggattacaggagtgagtaactgtgccccgcctattttttttttttttttttttttttttttgagacagagtctccctctgtcacccaggctggagagcagtggcacaatcatggttcactgtaacctcaacctccagggctcaagtgatcctcccacctcagcctcggagtagctaggactacaggtgtgcaccacaatgtctggctaactttttttttttttttgagacggagtcttgctctgtcacctaggctggagtgcagtggcgcgatctcggctcactgcaagctctgcctcccaggttcacgccattctcctgcctcagcctcccgagttgctgggactacaggcacccgccccaactcctggctaattttttgtatttttagtagagatggggtttcaccgttttagccaggatggtcttgatctcctgacctcgtgatccgcccgcctcagcctcccaaagtgctgagattacaggcttgagccaccgcgcccggcctggctaacttttaaaaatatacttttgggcccggcatggtggctcacttttggaggctgaggcaggctgatcacttgaggacaggagttcaagaccagcctggccaacatggtgaaaccccgtctctactaaaaattcaaaaaattagccaggtgtggtggcatgggcctgtaatctcagctgttcaggtggctgaggcacaagaatcctttcaacctgggaggtggttgaaatataaatataagatatatatatatgatatattctttatgtattaatttatgtataacatatattatatattaatatattttgtagagacaaatatatttatttgtacatataatatgtgtgtgtatttgtgtatatgtgtatatatatatatatatatatatattttttttttttttttttttttttcttttttttgagactgggtctcgctcttttgcccaggctggtctcaaagtcctgggctctagcgatcctcccgccttggcctcacaaagcactggaatcacaggtgtgagtcactgtgcacggccagttgtttttatcttgtaataaaaaagaagggcctccctgtagttgtgctgtggagaatggatcctgggggatgaggctggagatgggaaccaggggggaggctgaaatggacacagggaacggtacaggggcaggagtgccccaggctgcaggccccaaggtatttcgaggctgtggagacacaccttggaggaccctgagaggcatggccgctgtcttaccctgtgaccccacaggcccagcgcagcctgtgcctggggggcccccaccatcccgcggctccgtgcctgtgctccgcgccttcggggtcaccgatgaggggttctctgtctgctgccacatccacggcttcgctccctacttctacaccccagcgccccctggtgagtggcccctacccagcccctccctgagccactggagccccctgcacctctgatcatccctcccacaccaggtttcgggcccgagcacatgggtgacctgcaacgggagctgaacttggccatcagccgggacagtcgcggggggagggagctgactgggccggccgtgctggctgtggaactgtgctcccgagagagtgagtgctcccccaggatcagcgggttggagggtcccctcgggaggccattggctggtcccagcttcttccatccacaggcatgtttgggtaccacgggcacggcccctccccgttcctgcgcatcaccgtggcgctgccgcgcctcgtggccccggcccgccgtctcctggaacagggcatccgtgtggcaggcctgggcacgcccagcttcgcgccctacgaggccaacgtcgactttgagatccggtacggcctctgcctcacttctccggcctctatccccaccctcgggcagcccctgtccactgacccccagccccctccaggttcatggtggacacggacatcgtcggctgcaactggctggagctcccagctgggaaatacgccctgaggctgaaggagaaggtgcagggcttcccagggcagggctgggtggggagctggtaccctgctgccaccgctgacccacccatgcccacaggctacgcagtgccagctggaggcggacgtgctgtggtctgacgtggtcagtcacccaccggaagggccatggcagcgcattgcgcccttgcgcgtgctcagcttcgatatcgagtgcgccggccgcaaaggtctgtccccgggcccgggctcctgcccgcctcattgatgtgccaagtcgggggtcggaaaggcaggtccggtggagggaatggcaagcatgaaggtgccggggcaggagcaccccagcccatgtggccagatggagtgagcacagagggtgtggagatggcctggaggtgagagcagagcaggagccagggtgagccacgtagggccggcaggcagcggggacagccccggggagatggcaggtgcagcctccctgctgtgttgggagtgaggggcaggagtcaggcccctgcatcctcctgcctcgcaggcatcttccctgagcctgagcgggaccctgtcatccagatctgctcgctgggcctgcgctggggggagccggagcccttcctacgcctggcgctcaccctgcggccctgtgcccccatcctgggtgccaaggtgcagagctacgagaaggaggaggacctgctgcaggtagctctcgctccacgccccacaccatttcccggggtccccgccagcctccgcgtcctgagccatcagctcctgggtgctgcgacgcccatgtctgtgggtctgggtgggtgtctgtgggtctgggtgggcccctgtgcaattaggcttgagcacttcccctctgggttctgcaggattttcaggggtggctggggttctagaacattctggaagtaggggaatccgaggcagggcaaccaccagggtgacccaatgtgctcccacccccaggcctggtccaccttcatccgtatcatggaccccgacgtgatcaccggttacaacatccagaacttcgaccttccgtacctcatctctcgggcccagaccctcaaggtgagggctgggcaggtgggaggcttctctcagatgccccaggtgtggcctccgggccctgggcctccttcccactccctctccacatggcttggtgcatcttgctctgtgtgcctcagccgattgcctgcaggggcagcctaggcctggtcctgccctgctccaagtcgaaaaagttactgtggcttttatcagaggcaaggagggcgttacggtggagtaagagaaggctgtgcattcaaggtcggcctgaagcttgcaggggttcaacaagccatgaagcagccactgaatcccagtcttcctttaggttatatcagcataaggaaaagaatcataatggaggaggaggggggagtgtgttgactgatggggcaaattccggatgcttcttgagtctgcatgtgtgtaagggtggattcctctgcccgagttgctgtaacaaagagccacagaccaggtggctgaaaacagcaaaaagtcattgtctcaccgtcctgaaggctggaaagtccatgaccaaagtgtcagcgggcctgcttccttcgggggctgcaagggaggactggttcacggcctctctccttggcttgcagacggccatcatccccctgtgcctcttcacaccgtcttctctctgtgcgtgtctgtttccacatgtcctcccttttttttttttttccaagacaaagtctcgctctgtcgcccaggctggagtgcagtggcgcaatcttggctcactgcaaactccgcctcccaggttcatgccattctcctgcctcagcctcccaagtagctgggactacaggcgcccgccaccacgcctggctaattttttgtgtttttagtagagacggggtttcactgtgttagcgaggatggtcttgatctcctgaccttgtgatccgtctgcctcggcctcccaaagtgttgggattataggcgtgagctactgcacccaaccccttttctctttcttttttttttttttttttttttgagacagagtctcgctgtgtcgcccaggctggagtgcgatggcacgatcgaggctcactgcaacctccacctcccaggttcaagcgattctcctgcctcagcctcccaagtagctgggattacaggcgtgagccaccacgccccgcaaatttttgcttttttgttattgtttcttgagatggaatttcgctcttgttgcccaggctggagtgcaatggcacgatcttggctcaccacaacctccgcctcccagggggcgctggggtgtagaagtgattctcctgcctcagcctcccaagtagctgggattataggcacccgcttccatgcccgactaattttgtatttttagtagacagggtttctccatgttggccaggctggtctcgaactcccaatctcaggtgatctgcccacttcggcctcccaaagtgctgggattacaggcgtgagccaccgcgcctggcctatttttgtttttgtttttgttttttttagcagagactaggtttcatcatgttggccaggctggtctccatcctcacctcaggtgatctgcccacctcagcctctcaaagtgctgggattacaggtgtgagccagtgcacctagcccacatgtcctctttgtgtagtgacaccgtcgtgaggtgagggcccaccccagtgacctcatcttcacttgaccccctgcgaagacatatttccaaatgaggttacattctgaggtgccgggggttagggcttcaacatcttttgggagaacatggttcagcccttaatgagatatattgccttattttcctgcttttctctatgtctggccagcttggtaatggaaaaacaaaacaggctgggtgtggtggctcacgcctctaatcccagcactttgggaggatgaggcgagaggatcgatggagcccaggagttcaagaccagccagggcaacatagcaagaccctgcctctattaaagagaaaacaagaaaaaatccattctaaaatacagaacaaactcttaggacccccagtgtatattccacagcgtggcgctgatgcccgggccatggtactcctcctccccttccctgggtgtccctcaccctctgccctgtccccagctcaggcttcttctggcctcagtctcccccaggctgggccccagcaccctgcaaggcctcctgcagccaggcgccctccagcgccctcagcatccatctcagcccagctccacgccgcctcctgcctctgcccccacctggccgcctgctcacagtgtccccaaatctcttcctgtttcctgcctaggtacagcccgcagacactgggctccatccttggcccccagtccatcagggcccctgactctcgctatcccagccttggctgcagcttagtccttactccggactccctccccagtctccagccacccacacccagccccagaccgtctttctgcccccagggttgctctcgaccccctagggttgttataaggatgttgtggttggtctcaatctccgttcttcaggcttatgtgacggggacccgcagcctgctgcacaccctgcctctcctcctcaggtacaaacattccctttcctgggccgtgtggccggcctttgctccaacatccgggactcttcattccagtccaagcagacgggccggcgggacaccaaggttgtcagcatggtgggccgcgtgcagatggacatgctgcaggtatgggcgggaggtggggtgtgtccctgtccttggaaggccactgcccaggcccgcagcccaccagcccacccacccacctaggtgctgctgcgggagtacaagctccgctcctacacgctcaatgccgtgagcttccacttcctgggcgagcagaaggaggacgtgcagcacagcatcatcaccgacctgcaggtgcctgctgcctccctgacctctcaccccaacctctgacctccacctcacccttccccggcctctgacctcaacttcacgcccccacgtctgacctcactctttgacctgctgttatgacctgtgaccttacctgacgcccactttttcctgacctctgaccccagatttctctccactcctgtgacctctgtcactatgaccttgtctctgctttcctggcctgaccacaggtccacggtggccttcaggctgctccctcctcctccctctggccctgtggactccctggcccccaaccctacctccatccccacccagaccctgacgacttggagggccctcctgcccgcctcacctcccaggccctccccaggctacctcaccctgacccccacttccttctcctgctccacctcccacccccaacccctggtccctgaccccatccgtgcccatccccagaatgggaacgaccagacccgccgccgcctggctgtgtactgcctgaaggatgcctacctgccactgcggctgctggagcggctcatggtgctggtgaacgccgtggagatggcgagggtcactggcgtgcccctcagctacctgctcagtcgtggccagcaggtcaaggtcgtatcccagctgttgcggcaggtcagtagccgagacttgtcctcgccaccccccaccaggcacgtctgtggccccctccaggcaatggcatcctggatgcactttttctccccactcccaatccgcacggccccacctatacccactccatttcccaccttctcccctcccaggccatgcacgaggggctgctgatgcccgtggtgaagtcagagggcggcgaggactacacgggagccactgtcatcgagcccctcaaagggtgaggccccaggctgggtgcagtttttacctgtaatctctgggaggctgaggtgggaggatcacttgagctcaggagtttgagaccagccagggcaacatagcgaggcccctgctccacaaaatttttttatttttatttatttttatttttatttttttgagacagagtctcgctctgtcacccaggctggagtgcagtggcgcaatctcagctcactgcaagctttgcctcccgggttcacgccattctcctacctcagtctccacagcagctgggactacaggcgcccaccaccacgcctggctaatttttttttttttttttttttttgcatttttagtagggacggggtttcaccgtgttagccaggatggtctcgatctgacctcgtgatccacctgcctcggcctcccaaagtgctgggattataggcgtgagccaccgtgcccggccgaaaaaatttttaaaaattagccaggcgtggtggtgcatgcctgtaatcccagctacttgggaggctgagctgggaggatgatgagcccaggaggtggaggctgcagtgagcgatgattgcgccactgccctccagcctgggcgacagagcaacaccccggccctaaaataaattaataggccaggcacggtggctcacccctgtaatcaatcccagcactttgggaggtcaaggcaggcggatcacaagttcaggagattgggaccatcctggctaacacggtgaaaccccgtctctactaaaaatacagaaattagctgggcatggtggcgggcgcctgcagtgccagctactcgggaggctgaggcagaagaatcgcttgaacccgggaggtggaggttgcagtgagctgagattgcgccactgcactccagcctgggtgacaaagcgagactccgtctcaaaaaaaataaaataaaataaaatagtagattaattatatatattatttttctttttctttttctttttttgacacagggtctcactctgtcacccagggtggagtgcggtggcatgatcttggcttactccacctcctaggctcaagcaatcctcctgcctcaggcccctgagtagctgggaccacaggcgtgcaccaccacacctggctaatttttaaaatttttttgtagagatagggttttgccatgttgcccaggctgatctgaaactcctgagttcaagcgatcctcctgcctcagcctcccaatgtgctgggattgcaggagcgagcactgctcccagccaatgaatgattttttttttttaaagggtgaggccacaagacagggcgggggcggcatgggaactcctagccctgactcccggccgcggctgctcccctcccaggtactacgacgtccccatcgccaccctggacttctcctcgctgtacccgtccatcatgatggcccacaacctgtgttacaccacgctccttcggcccgggactgcacagaaactggggtatagtgcccaattcagcatgtgtcccccgaggcccatctgggccttcccttggggggctcagtctggtggggggcataggcacaggcccagagatagtagggagtggaggggtgcttgaggggcctgcgtgtgctcatggccaaggccaggaccgtagggcagaggtgggctggagcaggagggtggccggcagtcaccccaacatcttccaacccagcctgactgaggatcagttcatcaggacccccaccggggacgagtttgtgaagacctcagtgcggaaggggctgctgccccagatcctggagaacctgctcagtgcccggaagaggtgagccctggagatcgcctgcttggagctcagacctgttggggcctctgggcaatccctgtccctcactgggacaccccagggctgcccagccaccctgccctcagctgtgcgtgaattagcacaaggcatcccctcctggcagcttccttttgcccccttggccagaagcttctgtgcagtgcacagtacgcccaaccgtacatggcactcacttccagaaaggagccctgaccaatgcccaggtgccgcctgagtgtgctttccccgtgttccctcgcagggccaaggccgagctggccaaggagacagaccccctccggcgccaggtcctggatggacggcagctggcgctgaaggtgagcgccaactccgtatacggcttcactggcgcccaggtgggcaagttgccgtgcctggagatctcacaggtgggcactcgggcccctggaaggcaactgggggcaggtgggccccctgtgtaggagaccagggctccatgtgggggacctgtatccagaggactgggcaccccaactcactggccttctagagagaggatgccaatgtggcttgagcaattggtccattccttcactcagcaaatgcctactgagcacacactgtggtcagggctcactctgtgccctggggatacagaggggaacaaaatggatgagagctcctgtccctgtcatcttgcagcccagtggggacactgacaggtctgtgtaaacgtgtttaggacacaagtggcgctacgagctttgcagccggataaagcaggaggtgcggactgtcggggagtgatggggctgggcgggactcacccctctcaataggcgacgctcacacagaggccaagggacgtggggagggaagccattcaccgtccccacggcagcgtcccggtctgcctacccacggcagctctgctgcttgaacagaaaaacagattctttgaaaccacagagggcctgagtttccgagattgccaagctggggtcagtgccccagctcctggcatatgagggcctcggaagggtcttcctgtccagccttctcccctgggacttgagtcttggcccattccaggccagtagttgtgctgctctgcttggttacctctagccacggggagctccctctctggctgggcactgcgccacttttcacagggctctgggtggaaggcttggatgaattctcagtgggtggggcctttgcacacacccacccacccgcagttctgggggtcccaaagaccacttaggttcagtgattcactagaagtactcagagagcagaaaagctggttctcatggttatgatttaatacagcaaaaggacacagattaaactcagcaaaagaaagaggtgcacagggcagggtataggagggaccaggcgtgtcttccagttgtgctctcccagtagagttgccaggctggccctccttcctcccagttttgatgcgtgcctgcacacatgcagcattgccaaccagaggctctcacccaagctttggggtccagggtttttcttgggtgtcagtcctataggcatggagcaccctgtgactggccttagtgactccatcatccccaggcccctcagcaacccccagaggtcaaactgatactgcatggcccagggccctaccataaaccatgttagtgtcaactacctggtgtggttcaaagtcccaggtacacaaacaccttttttttttttttttttgagacagagtctcactctctcacccaggctggagcgcagtggcacaatcgtggctcactgcagcctcaacctccgggactcaggtgagcctcccacgttagcctcccaagtggctgggactgcgggcacgtgccacctatttttgttattttttgtagagatagggtctcgccatgttgcccaggctggaacagagacactgttatcaggcgggatattctaggggcttagactaccaggagccaggcaagagccagacctttctttgcacaaagtgaatcgctcactgcatgctcccaactcccctctgcctttcacagtccccggctgcctccccagcctccttggtggaaaggggtggctgtgtggacatcaggctctagccctgaagcagaggccaggccaagagagcacagcttggccctcccctggggctgcctcttaccaatcctgtgtctctgtcttttctctctcagccgcttccctctgtcactgttctgtttctgtctcttgacctctttccttatttctgtctctcaagcttatgggagcaagaggtggaataataaaaatgcaatgaattggctgggcgcggtggctcacgcctgtaaccccagcactttaggaggccgaggcgggcggatcacgaggtcaggagttcaagaccagcctggccaacatggtgaaaccctgtctctattaaaaatacaaaacattagccaggagtggtggcaggtgcctctaatcccagctactcgggaggctgaggcaggagaatcgcttgaacccaggaggcagaggttgcagtgagccgagattgcgccagtgcgctccagcctgggcaacagagcaaaactccgtctcaaaaaaaaaaaaaagtaatgaattacagtgttcacgcctgtaatcccaacactttgtgacactgaggagggaggatcacttgaggccaggggtttaagaccagcctgggcaacatagtgaaaccccatctctacaaaaaatacaaccaaacaaaactagccaggcattgtggtagctcatgcctgtagttgcagctactcaggaggctgagacgggaagatggcttgaacccagcagtttgagttacagtaagctgtgatggcatcactgcactccattctgggtgacagagttgagaccctgtctcttttagtttttgtttgtttgttttgagatggagtcttgctctgtcacccaggctggagtgcaatgccacaatcttggctcactgcgacctctccctcccgggttcaagtgattctcctgcctcagcctcctgagtagctgggattacaggcacccgccaccatgcctggctaatttttgcatttttagtagagacggggtttcaccatgttggccaggctggtcttgaactcctgacctcaggtgatccacctgcctcggcctcccaaagtgctgggattactggtgtgagtcaccacgcttggcctcctgtctcttaaaaaaaaaaaaaaattgaatcatttcaggaaaagattacaaaggaaagaaaaaggaacataggacaggtggaacaagtaaaagctagacagtaaagtggtagacgtaagcccagctatatcagtaattacactaaatgtaaatggacaaaatgctctagttagacagatttcctgactggatccacacaaacaaaaacagaagaatcacacccatctctccttggtgtccccacccccagcctcaggtttggtggtggtggtggtggtggtggtgttgttgtttaagtattttttagttttgtgtgtgtgtgtgtgtgtatttttagtagagatggtgtttcaccatgttgtccaggctgatctcgaactcctgacctcaagtgatccagccacttcagcctcccaaagtgctgggtgtacaggcataagccaccacgccagctagttttcttaactctaaaataagacagtgggtttctcaatggtttcttagtcagggtggtgccaccccctgctctggggggcatttgtcaatgtgtaggtagggccagttctggtggtacagggatgggggtggcactgctggcttccagggatggggctggctatgtcggtggtcctgtaccatagagagctgcccagaatgtcagtgtgagggaaacactgggccagtggcctcttcaggccgcagtctttccagcatgcatttgatgtagtcacttccttgtgcatgtccagaactctgagccagggaacccacttctttccacctgaccattgaggagccgccttatagtcccattttgcagatttgggaactgaggcccaggaggggcagagtggcttgtacataagcctatgccactgggaaatggcagaggcgggacccctcccccgccggcccacgttcactgcacatggcccccagggcttcactccgcatgattctctccccgacagagcgtcacggggttcggacgtcagatgatcgagaaaaccaagcagctggtggagtctaagtacacagtggagaatggctacagcaccagtgccaaggtcgggggctgcccaccgctgccctgagatgggcccagggcaggtggggggatggaagccgggccggacccccatgtccccgtgcctcctggtcacaccctgcccactctcctgttgcatccttgggtcccgttggcattagccacctgccaccccccgacaccagtagttgacagaagggaccctgcttctcacatacacacatccccaccgcccgcaggtggtgtatggtgacactgactccgtcatgtgccgattcggcgtgtcctcggtggctgaggcgatggccctggggcgggaggccgcggactgggtgtcaggtcacttcccgtcgcccatccggctggagtttgagaaggtgcgtggctgggtcaggggctctgcatttaggtgccctcatcagggtactcagggtgtcccgttctttgggttcacaaaagccacagtgtgaagggatgttgctgcttagattctcctgaggctggggccttggtttgggaagcctccaaggccttgggctttgttaccctggatggcatctgttctttgaaaaccctgtcgctgtccctggttttgaggtgtcacagtgtccctggttttgaggtttcccagtacctgtcagatgtggagctgccctccacgcagggaccctgatgggggtgcaccttagatctgtgcaccattgcccctggccctctgagtgcggcacacttggtcccaggaaaccttgcaccatattttcttttgaagagtctgggtctcgctctgtcgcccaggctggagtgcagtggcgagttcacagctcactgcagcctccaactcctgggctccggcgatcctcccgccttggcctcctgagccgccacgcccagttctcacactgtactgtttccccgtggcttaacgctctctcgtgccaggccttggacttggagcctcgcagagtggggaggtctctgcctcagggctcacccagccgtagtttctcctctctttcatgggatgcttcatcgactcgcctgtctggatctcatgttttagggactatctggatttatcccagtctctgtttcagattggggtctctggtgtgggggctctggcattgccgaggggcctcaggagccacttccagccatacagtgtctcggtccatcccaccaggctcagggcacggctcccatgtcctcaaactgcgtctgggaccctgtctaccttcagtttctggggggcgtctccagattggggcttggcctcctcaggctcagggtcttggccatggctccctcccaggtctacttcccatacctgcttatcagcaagaagcgctacgcgggcctgctcttctcctcccggcccgacgcccacgaccgcatggactgcaagggcctggaggccgtgcgcagggacaactgccccctcgtggccaacctggtcactgcctcactgcgccgcctgctcatcgaccggtgtgtggggcctcctccctcagactcagggggctgggccccaaacccctcctccctcagacccaggagtctaggccccagcccctcctccctcagacccacgggtccaggcccccagccccctcctcctcagatcccggggtcagggcccccagccccttcctctcttagatacaagagtccagacccccagcccctcctcctctgggaacacaggtgtcaggcccagctcttcctcggtggtgaagcagtggaaagagtcggcttgggcagctgtgggttcaggccctgcctctgccactctgcagcctatggtaggaagggcccctctctgccctgagcctcagccctaagagctcatcctggtctccagccctgagacccgtggaggcaccagcctggccctcagtgccttttggtgacgctgtgcggcccgctctcctacagagaccctgagggcgcggtggctcacgcacaggacgtcatctcggacctgctgtgcaaccgcatcgatatctcccagctggtcatcaccaaggagctgacccgcgcggcctccgactatgccggcaagcaggcccacgtggagctggccgagaggtcctgcgcggggcgggtggcctggccagaaataaccccctccttcctgccagctgggcccacttcctacaccctcgcccccacccccgccacccacctgccctcacccacccgccaccccatctccacgcaggatgaggaagcgggaccccgggagtgcgcccagcctgggcgaccgcgtcccctacgtgatcatcagtgccgccaagggtgtggccgcctacatgaagtcggaggtcaggcccacctggctgcctgctcccgcccagccccctcgctctcacttctgctttccgagatgggcgggcctgcgggaagggtggggcctcccgtgccctgtggggccctgagaaccgccccccatggcagcctgggtgtggcctcggccccctctggaggtcccccctctattctgacccctcccttgcttccctatggaaggggccccagtccctcccctgtgcatacagctccccagccgggggttcccttggattcataatcctccagctctacccccacccccagtgacccacatcttagccccatgacctctgacctcctgaccccttcctcatccttgcttccccttgtgaactctgacccttccgtggtgacctgagagccctacagactctgtggcccagagactccgtgacctccgaccccatcccagacccaggccccccccatgtcacagcccgcaggcaggcctaggccctaagccccaggccccatgaccaccccgtgtccaccccggtgccctttccctggctgcccgggtgtgactgccatgtggccgcaggacccgctgttcgtgctggagcacagcctgcccattgacacgcagtactacctggagcagcagctggccaagcccctcctgcgcatcttcgagcccatcctgggcgagggccgtgccgaggctgtgctactgcgtacgggggcaccaggggactgggggcaccctgggggggcagaggagatcaccggcccaccacctgcctcctctcctgcagggggggaccacacgcgctgcaagacggtgctcacgggcaaggtgggcggcctcctggccttcgccaaacgccgcaactgctgcattggctgccgcacagtgctcagccaccagggtgagcggccctggccactgggcccccactggccctcaacctgctctgccgtcaccccagatcctagacacccaccccatcggctggcactgccacccagtgggcccagggcccctgggtgggtggcccctgtctccaccccccacagagggtcctcggcccccaccccgggagttccccaggggagttttcccagcacacttgctccgttgttctccagcctctggggactttcagaagctgggattggcagtgggcagggatggggtggcccagttcctggctgggccccagcacttgggctgacccgcctccccacaggagccgtgtgtgagttctgccagccccgggagtctgagctgtatcagaaggaggtgagagggccgggaggtgaggaggggccaggtggggaggcgggggcgccctgctcagccgctgccgtccccaggtatcccatctgaatgccctggaggagcgcttctcgcgcctctggacgcagtgccagcgctgccagggcagcctgcacgaggacgtcatctgcaccaggtgtgtgccatgtcccgaccctgggctgccccgccccttcccagctcccaggcctgtgggttgtggacccaacctctgactccaaggcctctcctgagcatcctccccgcccatccccttccagctgtgagctgtcctgagcctcagtgtccttgtctgaaaaatgggcccatcccagccccccagagggggtgggtgcttagggaggcagcgcccggcacccagtgttgcccgggaaacggctgtcctcccgacacacccagccagcctggccccctccccagggcggggccgggctttccccagggaacgggtaggcggggtgggttcccacgccaggtgacaggtgatatacggccagccatggccctgcacctcgccaggcacccgctgttatcggctccccccccccaccccccccgtgcctgctgagcaaacagcccgctgcgggagggggcgggtgggctgggcagcaggcggggaccaaagtcctgggaacagcccccacccctctcccaggctgggcactgggccttggctggtcctgaccctgcccctgcccccacccgcagccgggactgccccatcttctacatgcgcaagaaggtgcggaaggacctggaagaccaggagcagctcctgcggcgcttcggaccccctggacctgaggcctggtgaccttgcaagcatcccatggggcgggggcgggaccagggagaattaataaagttctggacttttgctatatggtgctttgtggtctctgggggacactgtctggtttcataagccctggccttggctgggaccctcctgaggcccgcaccgcccctcatcctcagcaaaagcccccggactcccacctgtgctgcctggttcatgtgggccaagcctgcctcagtttcctctctggccctgaaggaacccttataccagcgcttctctgccctgcttagggcccccaggtgtctggccccggcccagccctccctggtgatgaccctggggaccctggtggctgccccgccctccaggtgctgacctgtttcctccaggccctggggcagccccaggcgcaccggggcttccactcctcagcccggccaaggggacccccccatcccccgccggaccacacacccacgatgtttccacgtcggggtcctggcaatgggctttgggtctgggtttccccccagcgactcccatctctatccccgcagcctctaactgccgtcagatgccctcggccctcccgtcacctcacacatcccccggggagagtcttgtgcttgcccctcggcccccagcccgcccctgctggaattcggctcctgggtccagatcctccgtttcctgattctcctcttcagtgaaccccagcccttcctcgatgttttcagggttcccccaaatccagctcctgtcccatctccagccctcaaggtcagccccccaaacccagccccacggggatccccaaatccagacagcccctggcccgccatccctgccatgtgacaaaggggttgtgcaatccagccccctcccctgaccccctccctgaggggatttttgaggagggccgagcttgtggccagcgggcaccctcctccccccggcaggggctgggccaagatataaatagggttggcggctgcagcgggcggcaaacagcccgcccggcaccaccatgctcgccctggaggctgcacagtaagtgagggcccccaaacctgcacccggggtccccacctgcactgcccctctgtggggcctcacccatgggcagtggtttctctgctcctcacggccggtgggtgggagtggaggggaggggtccaccctgtctcttgccccttctggttctgttccctcttcacttcggactctccatccccccagttcctatctttcctggtccccaaagatctcatttccccagaacacttgctagcgtgccctcctgcgggcgtcctccgtggctctcactctgtccatcctcctgtctccccgagttcccgtatctgttcgctctgtatctggcatctcccagctctcaacattctgcctgttgctctctgtctctctgcctgtctctgtgtctctgtctccagttctcgctctccctgccttttggtctccttctgcctcaccctcactctcagtgcctccatctggggctccaggaatcctccccgcctctgtgcgtgaatgtccctttgcacacctttctctgtgtcccacctctccttgagcctcctcatctgagtcttctccgggcttccccctctctacccagacatctctccatccttctcctctggtccaagctggactcaactgactcgccaccaaggccgcacttgacccaggccccctctccatccccacacctcctttccgggactttctctccctcactttccctgcccctccccaccagggtgtctatgcaaattctggggaggagggggacatttgcctcccccccaccccccacttcctgtcccagcagggggtagtgggggagtccggtgaatgtggtggggctggtccctcacacagggctgcggtggtcacagctgctgccgcctccccatcagcccccaaccactttgagattcaggtggctggaggcagcctcagcatgcccctgtgtctctccccctccaggctcgacgggccacacttcagctgtctggtgagttggggcccctgggggccagggaggggtggcccacagtgacctccctcagagaagtcatttgcttcctgcctcagtttcccctcccacctcttcctgtcactttgtttctgagctcccccttggtatctcctgctaccccgcatccgtatttttgatgtctctctccccctctcaggcttgaatccacttccttgtggctttgtatctctctctgcccatcccatattcagacaatgtattttcatgttcctttccttctttttgttcgtatttttaaaaattgtgttctctaacagttcagatacggaatactatacccaacacccttgaacccacaatccagtctgagtaatcaaatcttactgatgtggttgaaagaaagcccctgtttatgcccctccacattcacaccccagccatgttttttttgtttgtttttgtttgtttgttttttaattgaagtgtaactaacaagtcagtaaagtgacaaatcttgtgtttttgcattatctatacaccgtgtagccacaagccagatcaagataccgaacatttcaatctctgaaatattccttcctgtcccttctcagtcaatacctttctctgatattttccgccaccaatttgtaatttgttttgcctgctcttttttttgttttgctttttgagaaggagtctcgctctgtcacccaggctggagtgcagtggcagcgtcttggctcactgcaagctccacctcccgggttcaagcaattctcctgcctcagcctcccaagtagctgggattacaggcatgtgccaccatgcccagctaatttttgtatttttagtagaggcagggtttcaccatgttatccgggctggtttcaaactcctgagctcaagtgatcctcccacctcagcctcccaaattgctgggattacaggcgtgagccaccgcacccagctgcctgcttttgaactttatgtaaagtgagtcatacagcatgtcccttttggggtctggcttccctcactcaacatgaagtgtgtgtcagtgtttgtcctttttccttgctgtatagtactctatctatgatcagcccacaccacagtctgtttatcccttcttctgttgatgacacctgggctgtttccagttggagactcataataaagctgctgggatgattctggaacaaggctattttgtgcacatccattttcagttctcttgattaaatgccaaggagtgagactgccaggtcctaggcatggtgtggatctagctttagtttttcctagactcgagttcttgaagcaacaacacatgattcatggggcgaatcaacatatggagatttatttatttatttatttattgagacagagttttgctctgtcgccgggctggagtacagtggtgcgatctcggctcactgcaacctcagcctcctgggttcaagcgattctcctgcctcagcctcccaagtagctgggactacaggtgcgcaccaccatgcctggctaatttttgtatttttagtagagacggggtttcaccatgttggccaggctggtatcgatctcctgacctcatgatctgcctgccttggccttccaaagtgctgggattacaggcatgagccaccatgcccggcctatttatttttcgagacagagtctcactctgtcacccaggctggagtgcagtggcgcgatctcagctcactgcaacctccacctcccaggttcaagcgattctcctgcctcggcctccagagtagctgggattacagacatctgccaccaggcccagctaatttttgtattttcagtagagatggggtttccccatgttgtgcaggctggtctcgaactcctgacctcaggtgattcactggcctcagcctcccaaagtgctaggattacaggcgtgcgccaccacgcctagctaatttttgtatttttagtagagacgggatttcaccatgttggctagactggtcttgaactcctgacctcaggtgatctgcccgcctcggccccccaaagtgttgggatgacaggcgtgagccaccacgcctggcctggaggtgtatttaaaaagcattgacccctgcctctgttaagtgaaacacttccatttccccttgcccttcacctccggagcccccaggcaggcaaggctgggggagttcttccaccccttctccaggcgccctgattcgctgactgtgtgccagtgaggggccagggttcttgggagcccaccgtcttagcaggagctggctgctgtgtgcccctattgggttgtgtctctactctctgtatctctgtctctttgtccctgtctctgatgcctagtctctgtgtttctttgttgctctaatctctccagcatcccctcttctctcccatgtctgtgttggagtctccccaagggtccagggtgggggttgggagtccccaaggcctgggatgacccctcttccctcctgcaccccgtatcagtacccagatggcgtcttctatgacctggacagctgcaagcattccagctaccctgattcagagggggctcctggtgagtgaccccagccctgtgcccttcctgccttggggcccatttcacagataggggagctgaggcccaggggaggtcatttcctagcacaacaggataaaggtggcccgggcctatagccctcctcccctttcctctcctacccatccgctcctccatgcaaatcctggggtcagagatttgcacagcctacaatggcctctctgtgctgggggcttcgactgcgaggaggcctccgtgagacatcccagcttctgactcagtgcccttcccccagactccctgtgggactggactgtggccccacctgtcccagccaccccctatgaagccttcgacccggcagcagccgcttttagccacccccaggctgcccagctctgctacgaaccccccacctacagccctgcagggaacctcgaactggcccccagcctggaggccccggggcctggcctccctgcataccccacggagaacttcgctagccaggtgagtggtaaggggacagttaaaatcaagcccaaaccaggtgtggtggtgcacgcctgtaatcccagctgcttgagaggctgaggtgggaggaggattgcttgagcccagaaggtcgaggcaatccactgcactccagtctgggcaacagagcaagaccctgtctcaaaaaaaaaaaaaaaaaagaaaaagaaaagaaaactcaagctcagtcatttggttgaggtttgctgggtgccgggcactgcattgagactgcacatagtaagccctgcagcggcctcccaggttacgttccgttgttgcccctctgaacaagtgagtcaagagaggtagtgacaggaagccagggacagggcagactcgcattacctgtgttgggccggctttgaggaggtacctcaggtgtcccctggccacagcgtggtgatctgaacaaaggccaaaatctaggctgtcaacaaagagggagaccagagccaggagggccaccgccttggcctgagaggaggaagtggagggagacaaggggtccctggacatgcaggtgaccctgaccttccgcagaccctggttcccccggcatatgccccgtaccccagccctgtgctatcagaggaggaagacttaccgttggacagccctgccctggaggtctcggacagcgagtcggatgaggccctcgtggctggccccgaggggaagggatccgaggcaggtatgcgggagtggctggggtgggggagatgccagctggagatggtgggggggctgagagcaccatggcttcctgggcctctacatatactccagcactctgggcagctcccagatccgcaccacctgctggctgtgtgaccttgggtaagtgcctctacctctctgtgcccaggtttcctgtctgtgcgatggggatggaggtgatagtgtctaccctcctgaggtcgttggggggactaaatgggatagtaagtgtaaatgggacagcagtgccaggcacagagtgagcacttcaataagtcaacctcttcaccatcattcccgacaccacagcaacagaaatgataatgctatcaacccccaacggttcaacccttgccccctgcccgtgtgcccaacatcctttatgctcaaccccaagaaagctgagatcgttccttcctttctgtgtctgggcctcggtttctcgtctgtaaagtgggcatcactgtcatcctccccatctcacggggttatgatggagattcaatgagctcataactgtaaagtgccttgtgaagcacctggcactacatgctccacggtgcattgtaaaaatcaacacacaggctgggtgtggtggctcacgcctgtaatcccagcactttgggaggctgaggcggtcagatcaactgaggtcaggagttcgagaccagcctggccaacatggcaaaaccccgtctctactaaaaacacaaaaattaggctgggcatggtggctcatgcctttaatcccagcactttgagaggctgaggaggatggatcacgaggtcaagagatcgagaccatcctggccaacatggtgaaacctcacatttactaaaaatacaaaaattagctaggcgtggtggtgtgcacctgtagtcccagctactcgggaggctgaggcagaagaatcgcttgaacccaggaggcagaggttgcagtaagccgagatcttgccactgcagtccagcctggcgacagagtaagactctgtcttaaaaaaaaagaaaaaagaaagaaaaaaaaattaatggggcatggtggtacatgcctgtaatcccagctactcaggaggctgaggcaggagagttgctggaacccaggaggcaaaggttgcagtgagctgagattgcaccactggactccagcctgggtgacagagcaagactccgtctcaaaaacaaacaaacaaaaccacagcctcatttaaaaaattttaattaattaattaatttattttttgagacagagtctcgctctgttacccaggctggagtgcagtggcacgatctcggcccactgcaacctccaccttctgggttcaagcaatcctcctgcctcagcctccgcagtagctgggatcacaggcacccacaccatacccagctattttttgtatttttagtagagatggggtttcaccatctggccaggctggtctcaaactcctgacctcaggtgatccgcccgtctcggcctcacaaagtgctgggattacaggcgtgagccactgtgcccagccacacagcctcatttgtggctgagagacttcagctcagagaggttaattaagtcacctattttaacttaggacatttaagatggagaggatctctccaatgactaggaaagacacaagatggaaataaagattttatttatttttattcatttatttgagacggtctccatctgtcacccaggctgaagcgcagtggcgcaatctcggctcactactgcctcaaactcctgggctcaatcgatcctcctgcctcagcctcctgagtagctaggaccacaggcgtacaccaccacacctgactaatttttaaaatttttgtagaggtgaggtctcgctatgttgcccaggctgaactcccaactcctgagcctatgtgctcctcccacctcagcctcccaaagtgctgaagttacaggcatgagccaccacacccagccagaaataaattattttatggcttataggtcctggggcatacatggcacgcctggaggccacacacaccaggtcagggagcgcaggcagggagggagagagagagggaccagtggactgacgcctttattgggtccaaggcgtcggccaaacaggtttcctgagggggttttaattggtgggttcaggccaggcacagtggctcatgcctataatcccagcactttgggaggctgaggctggtagatcacctaacgtcaggagttcaagaccagcctagccaacatggtgaaaccccgtctctactaaaaatacaaaaattagctgggcctggtggtgcacgcctgtaatcccagctacttgggaggctgaggcaggagaatcgcttgaatccaggaggcagagtttgcagtgagctgagatcatgccactgcactccagcctgggcaacagagcaagactccagctcaaaataaataaataaataaatacttggtgggttgaaagcaagcaggatcaagttccaggaggtcacgctgtgcctgagagggggtcactgaggcatctgcacagtccatgcagggccgtcaagtaggctgtccatggctctcccacagggaggtggtcaccaggagtcagttgcataagagagatatctgggtcagccacactgaggaactcggggagggagatgtagaactgccaaggaggacagccctgcttccagcatgagaatgtccaacttttatttagttttattttattttattttgagagggagtttcgctcttgttgcccaggctgagtgcaatgatatgatttcagctcactgcaacctctgcctcctgggctaaagtgattctcctgcctcagcctcccaagtagctgggattacaggcatgagccaagcacacccagctaatttttgtatttttagtagaaaccgggtttcatcatgttggccaggcttgtctcgaactcctgacctcaagtgatctgcccaccttggcctcccaaagtgctgggatcacaggcatggcccaccgcgcccagcctccaacttatactttcgatgaatgccgaggcagcctaaaattataagaattcaatccgggtgcagtggctcacacctgtaatcccagcattttgggaggccgaggtgggaggatcacctgaggccaggagttcaagaccagcctgggcaacatagtaagacaccatctctacaaaaaataaaacaattagctaggcatgatggtgcatacttgtagtcccagctactggggaggctggggcaggaggattgcttaggcccaggaggtcgaggctgcagtgagctgtgattgctcctctgcactccatcctgggtgacagaacgagaccctgccttgaaaaaaaagaaattaagatgtcactacgtcaccaccccaaggtcacactgctgtaaaatggcagagatgggattcttgtagccagtgccctgctttgaaactcccagttattggccgggcgcagtggctcatgcctgtaatcccagcactttgggaggtcgaggtgggcggatcacctgaggccaggagttcgagaccagcctggccaacatggcgaaaccccgtctctactaaaaatataaaaataagccgggcatggtggcagacgtctgtagtcccaggtactcgggaggctgaggcagcagaattgctcgaacccaggaggcagaggctgcagtaagccgagattgcgccattgcactccagcctgggccgcagagcaagaccccgtctcaaaaacaaactaaaccctaggagcccaggagtcaggtgccctggcctctcccgggaccctgtcccgctttgggctgagaggctgggagaccaggagctggagagatagccaggccaatgcaactgcctccagatctgttcgcctctccgttataatcctttaagcggcgctgtcaacccatttcacagattctttcatccactagctcaacaaatatggaatattacgtgctggccgcagggcggaaggcaggacagatgtaaatctcgaaaattaaagcacagaacgcggagggggcctggggctgacagcttcgggcagggggagtggcttgcccccccccccccccgtggtgaggggcgcagagccaggtgtatgtaacagccacttccctcaccccacttttcagatccaggagatggaggccggggtggaagtctcggaggagggtggatggggaaggcggggccttagggacccctcacctaacgcgtgcccccgaccccaccgcagggactcgcaagaagctgcgcctgtaccagttcctgctggggctactgacgcgcggggacatgcgtgagtgcgtgtggtgggtggagccaggcgccggcgtcttccagttctcctccaagcacaaggaactcctggcgcgccgctggggccagcagaaggggaaccgcaagcgcatgacctaccagaagctggcgcgcgccctccgaaactacgccaagaccggcgagatccgcaaggtcaagcgcaagctcacctaccagttcgacagcgcgctgctgcctgcagtccgccgggcctgagcacacccgaggctcccacctgcggagccgctgggggacctcacgtcccagccaggatccccctggaagaaaaagggcgtccccacactctaggtgataggacttacgcatccccaccttttggggtaaggggagtgctgccctgccataatccccaagcccagcccgggcctgtctgggattccccacttgtgcctggggtcctctgggatttctttgtcatgtacagactccctgggatcctcatgttttgggtgacaggacctatggaccactatactcggggaggcagggtagcagttcttccagaatcccaagagcttctctgggattttcttgtgatatctgattccccagtgaggcctgggacgtttttaagatcgctgtgtgtctgtaaaccctgaatctcatctggggtgggggccctgctggcaaccctgagccctgtccaaggttccctcttgtcagatctgagatttcctagttatgtctggggccctctgggagctgttatcatctcagatctcttcgcccatctatggctgtgttgtcacatctgtcccctcatttttgagatcccccaattctctggaactattctgctgcccctttttatgtgtctggagttccccaatcacatctagggctcctccaagatccttttgtcatgtctgaaatcactcttgagaggtctggggtggaggatggggagtcagtgaaatgtgtcatgtctgggccctgtcagggacacccttgttatatctgggatcctccaatcacatctgagacctcctaggctctccatctgatatgccctttcagggaccccacaaagactgagttctcatggggatcctacccttcctagtgccactccctatggccatgctgaagaccactctggccacgcgactgattttgggtgatcatggcagctccccacccatgtcatttctaaccagaagtctcaaggtcgtcacccccctgccccccaaccgaggccccggtcgctggtggtggtctctttagtgcactgtagcacttggtggtggaggtgtgagggatccacattaacagcaggccatcagctgggcaatggctcacacctgtaatcccagcactttgggaggcgaggcagggggaatggcttgaacccaggcattcaagaccagcctgggcaacataatgagacctcgtctctacaaaacataacaaaaacaattagccgagcgtgggggtgaacacctgtggtcccagctgctcaggaggctgaggtgggaggatctcttgagcccaggaagtaggaggctgtagtgagctgtaatcgtgccactgcactccagcctgggcgacagagtgagacaccgtcttaaaaacaaaaacaaggccgggcacggtggctcatgcctgttgtcccagcactttgggaggccgaggcaggcggatcacgaggtcgagagatcgagaccatcctggccaacatggtgaaaccctgtctctactaaaaatacagaaattagctgggcgtggtggcacgtgcctgtagtcccagctactcgggaggctgaggcaagagaatcgcttgaacgtgggaggcagaggttgcagtgagcctagattgtgccactgcactccagcctgggggacagagcgagactccgtctgaaaataaaaacaacaaaaacagcagaccattcaaaatagggagactttgcataatccagatttctgccttcacttaaaactttggacggtctggagagagtcggccagttttcggtggggggtggggagctggaacaggacagtagcctttcctaatgaggcatttgttctccaatctgccccagtcgctgccatccctggctatctcaccctagcagcttctcaagcctgttggctttagaccactgtataaacccagctggaactgaagcctgggtggactatggagccctggttgggacccccagggagtcaaaggctgcgggccaagaggccagaggtccttgagcctgggtgggcaggtggatctagggtgcatgacttgctgcttcccaaccttagtttgtcccttctgtgaaaaagggagagaaggaggaggaagatctcaaaaagactttccagcccagtgcggtggctcacgcctgtaatcccagcactttgggaggccgatgcaggtggatcacctgaggtaggagttcaagaccagcctgaccaacatagtgaagccccttctctactaaaaatacaaaattagctgggcgtggtggcatgtgcctgtactcccagctacttgggaggctgaggcaggagaatcgcttgaacctgggaggcggaggttgtagtgagctgagatcacaccactgcacaccagcctgggcgacaagagcgaaactccgtctcaaaaaaaaaaaactgttgcagccccgttgagcctttgacaccgcctgaaatccaccccactcccaggaggaggaggaggaaggaatgccaatgacctagagacacgagaagtccatgtggaggcacacagcagctgatggcagagcccaggctgggacctgcccttaagagaatgagtgggaagggggagggaggaagggcaggtaaaacgtcctccccagggccccctgcaacggggaaggtactttttacaaaagctatcattgtcaccctaaatgtggaataaaataagatgcatcgacgtagacaaacctcctgggaccttttgtcagggactgcaatcctgcccctccactgaggccgctggctctcagagacaccgtgacatcacgggtgatgatgagaggagttcaaagagagaattatatgctggcgcggtggctctgtaatcccaacactttggggggccaaggcaggaggatcgcttgagtacaggagtttgaaaccagcctgggcaagatagtgagatccccttcccacccgtctacaaaaaaaataaaaaattagcggggtgtggtggcgtatgcctgtaattccagctactccgaactactgaggtgggagggtcacttgagcacaggaagttgaggctgcagtgagccgtgatcgtgcccctgcactccagacacggcgagaccctgtctcaaaaacaaacaaacaaatcacaaagacaccatacagcaaaacctatctgaaccttaatgccgagaaataagaggcttgacgcgcaggcacagagggttccgtttatgtcttcctctattcctgccaactgaagttctccacctcctccccgcttccccttccgtctgggtgtctgtccccttccctctgaattgagccctcgggctggcagcgagggacgcgaggcttcaggtggccgcggcactgcaggcctgggcccctccccaacttagcggggctcgcgggagcgcagtggcagtctgcctggcaacccgtgacatcacatggaactgacgccggattggctggacgctccccggaggcggagaaatttccggctcgtagggggttttggaaaaggaggagggggaagatgaacaggaaaaaaaagcggagggacttgttttcctcacaccgggtccctcacgctgcgttactagccaggcagtcccccagccttaaccctaagtccccaacaccctttccctccttcctccccacaacacctggtgtccccaagccccgcccctccccaggccccgccccctcggctccccgccgcgtccagagccaccccattcagaaagtcacaggtccccctgccgggaagggcgccaacgtccgggcagccctccagggccttcccagcctcccacccgcccccaccggggacgcccaccccctacccgcgtccggtgcctgccgtgcccgctccgggaagagtcgcggggagcggtcccaggaggggcggcggccagtccggggtcccagatggccggggccccagctctttgggtttgcccacgcccggggcgcgaaactccggagtcccagagccgcggcgccctccccggaggcgcagggacctcctccccccgccgccgtcctgcctacgctaggaaaccggaccctccctcccggctccggtttcccgaaaactcctgacttgcagatgctaagaatggcttcctagaccctgtccctcccctccctgcttcatgccagagctctggcccgcagcccttacccccttgagaccctcagtctcttcctcttccttctcccgggacccaggcgtccaggcgctcgtcctttctagggaacccaagaatctgggaccccagttgcttctgctcccagactcaggggtccaagcacccagtcccctcctccctgagattctggagtccgagccccagccccctcctccctcagacccaggtgtccgagccccagcccctcctccctggggacctggctctcagccatctccctaggtccagctgttatttctcgccctttagaacatgcgggcggaatgtggggcggccctgtggtctgatgtctcccggagccttctgggagtctcaggactcattaaaaggctccccttaggggcccacctgtcctccctagggcctagcgggacgcggctgcggtcagaggagcaggaggaggtcccccgacatgcctgaggcaaaaccaggtggcgccaggaccccctccctgtgtggggatggggctcttcttttctggatggggatttgggacccctctgtttgtagggttgggagaaggaggaaccttcgctgtgtgaggaggaggctccctttgctgtgcgggatgggggttcccgcatcagtttagggtgagggtctcgactctgcatggggaagagggtcccttccctttgtgacaggagtttccttccttgtatgagatggggtgggtctcatatctgtgtggggtgagggatccccttcactcagcagggagggtgtttctttttctataagtgattgggggggcatctctggtggagatgggattctctggttgtaaattgggttccttttgcttgatggggatgggggtctgtgtgtgtagactgggtttttttgtttgtttttgttttttggtttttggttttttttttgagatggagtctcgctctgcccccggggctggactgcattggtgcgatctcggctcactacaacatccgcctcctgagttcaaacaattctcctgcctggggtagctgggattacaggcctgcgccaccatgcctggctatttttgtatttttaatagagacgggtttcgccatgttgaccaggctggtctcaaacccccaacctcaggtgatccacccgcctcagcctcccaaagtgctgggatgacaggcatgagccgccgagcccggccagactgggaggtctttgcatgtgactggattctccacatccggggatggcatcctctgggcagggtctgggccacttctctgagtgaagactcagagggagccaggtgcaggggctcacgcctgtcatcccagcactctgggataccgaggcaggaggattgcttgaggccaggagttcaagaccagcctgggcaacatggcgagaccttgtctctacaaaaaattaaaaatcagccaggtgtggtggtgcatgcctgtagtcccagatacttaggaggcagttgaggctgcagtgagctgtgatcacgtcactgcactccagcctgggtgacagagtgagaccccgtctctaaaaaacaagcaacagcaacaacaaaaatggcccagtgcggtggctcatacctgtagtcccagcaccttgggaggccaaggtgggtggatcacctgagcccagcagttcaaggccagcctggccaacatggcaaaaccccgtcactacaaaaaatactaaattagctgggcttgtgggggtgtgcctgtagtcccagctactcaggagtctgaggtgagaggatcacttgagcccaggagacggaggttgcagtgagcccaaatcttgccactgcactccagcctgggagacggagcgagaccctgctgggaaaaaacagaaacaaaaacaaaaaatagattccaagggaccttctctgtaggatatggggtgattgtgggtataaagattagtggttcccatctgcatggagtcacaggggaagtctctgtattaaggatgggggagcctcatttctgtgggcactgaggcttccccgtgtaggaattagcggggcttcttcatgcagggaatggggtcctttttgcggggtttggggaccttctttgaatggggaacactttctgtggagatgaggctttctctctatgaggaactcaccgcaggaatcatgcaccgctgggcggaccccctcctgggatgtctggtccgctggcatcaggccaagcaggctgtggggtgggtccagcccctactgtagctgcagacccagccggcaaggaacagcaggcagggcaggggaaggatgctgcggtcagcaccaggtgtccagtttccagcccagagggagagctaattataccctcggacccaaaaggtcagggcgtggtggcctgggcggatggggcagggcctgctgggggtaagggaaacccgatcccacagactctcagatctgagataaatttatacctagggtgggggcctggactcttgggtctgagggaggaggggctgggggcctggactcctgggtctgagggaggaggggctgggggcctggactcctgggtctgagggaggaggggctggggggtctggactcctgcgtctgagggaggggcatgggtgtgcagaccgcatgctcaactatgactgtcccctaccttacagcggccaaaaaggcccccaaaggcaaagatgcccccaaaggagcccccaaggaggctccccctaaggaggctcctgcagaggcccccaaaggtgaggaggtgctccctcgggctcaaccgacctggcttctcatctccatcctcctcgctacgcctctccaggcctttccccagcctctatccttgaatctgtccccgcacagccccagggctgacccacgcctcccgtgctcccagccctcccggggctccctggcacccgcaggcagagcccagcccctcggctggcatcggctccggtcagctggctgattgatcaccaggtccggccccggtctctctaaacctctcccgccccaaaggcacattcagtgccctccagtccacagatgaggaaaccgaggcccaaaggggtgagggagcctggccaaggtcacacagccacgagggtgacaggtggcctttcccaggtcaggaaaagccatttaacccccatgatgtttggtttctgagtagaggggccctcactgtctctaagtcctttccccaaagcggcccactgtcccctccccagcctatctcagacctcctcatcctaatcctgtcccctgaacagaagccccacccgaggaccagtccccgactgcagaggagcccaccggcgttttcctgaagaagccggactccgtctcagtggagactggtgaggggaacccgggggaggaggggctgcggcccggactcctgggtctgagggaggaggggccagggtctcgttctgtctccctctggagagccttatgttccttcctgggcctcctcccactctaccctgtcactcaccccatgtagggaaggacgcagtggtcgtggccaaggtgaacgggaaggagctcccagacaaaccgaccatcaagtggttcaaggggaagtggctggagctgggcagcaagagtggcgcccgcttctccttcaaggagtcccacaactccgccagcaatgtgaggaccccgtgggccagagggctggtggaggggagtggagcttgtgcaggacatgctcctcagaagccctgttgcctgaggcatcaatgtgggcctggagccgggatggagagtgggccctctgaggatggaggttgtgcggggctgctggggagaggttgtgtgaagcagagggaggatgcctggggttgggtggggatgcattagggcttggtcatgtacattcctggcaaggcctgagggggccagggacctgggccccagaagtcctgatgggtcagatatgaggagacagagctggccaccaggtgctgagacccctctcggtctccattggcccccctgtggggtgggggtgaggacgtggagatagagctatgagtggactctgaggaatatggggtggctctagagggtggtcccgtgcacccacacccccggccctggacccaggtgtacaccgtggagctgcacattgggaaggtggtactgggggaccgtgggtattaccgcctcgaggtcaaagccaaggacacctgtgacagctgtggcttcaacatcgatgtggagggtatgctggtgggggatgcgggagcaaagggttctatgtctgggtggggtggacagatgtaccagccaggtgttgggagagtgcacaggcatgggcatgaggtgggcacaggtttttggaggagggagtgcagattctggggtcagagtattcaaactcaaggagacatagcatgggaggaggtctggatttcgggggtgaaagtgtacagggtcttgggatgcacatgcaaaggcttaggaggtgagttatgcacattccacgtttaagaaagtaggcaaaacggcttgggaagtgagggtgtccaggtttagagaagaaggatgtaggggtttagagtgagggtgtacaggattaacaggaggttacacggatttgagggcacatatatgggcccctgagggtgtatgggctctgggggtctgcagcccagaatgtgtgagggcttaaatgtggggtgcacaggaaatgagattgtccaggcctggggagaaagacatggtggcccaggtgtggggggtataggctgctgagagagggtggagcttggcagctggggaaatgagtatgagctggtctagaactagaggatgcccaggcctgagcaaggttgtgctggtccaagagatggagaaaagggggcctggaagaggttgtgcaggcctggagaggggctctcagtctaagatcagccctggcctctaactcaccttcccttctctcatcacctctccccagcaccccgtcaggatgcctctgggcagagtctagaaagcttcaagcgtacgtaagtgaccccaggcccttaccagggtcccaaggaccatgggaggctctcccttggaaggggaaaaagggaggattggggaaggcaaggggtgaatctgaagggtcaagactcacatgccctctcaatggccacaggagtgaaaagaagtcggatactgcaggtgagctggatttcagtggcctgttgaagaagaggtgagccccggacttggcacagagaggggagatgggactcaaggggaggaggtggtgggtgaagctccatggcccactgattcctcctggacccactgcttatccctctaccacctccatctgttcactccctgcccacccagcatctaacacaccaacccatcaggctgcctgttcatccacccacctacccatttacccagacccctacccacaaccccacccagccaaacatctgccatgagttcacccaccttctcaccccttaacccaccattctcacacccactctgctgttcactcaggctctagttcacctatgcctccacctactcaccctcccatccatccatccctccatccctccactttccacccactgatccattcactcacccatccatccaaccagtggcctatttatgtatctactaatacatctatccacctacctgcccagttgccaatctatctacccacatatccatccgttaaccaccattttcccacctgtttacctgcccatctgccattacagtcagcctagctacatgggtaggtggatggataacgggtgaatgggatgttggatttggttgggagatgcaggtgcagatagacaggtgggaaggtgggtggatggtacggatgaatgcatggtggagaggtgggaggatgggtgcctcagtaggtggggaagcggatggatggatggggtgggtggacgatgaatggatgggttcatgaataggtggctgagttcaccagtgaagaggtgggcagttgacacgcccatccacacagatagccctctgttagattgaactatgtaaaattgatgttctgcaggtaaaaaatgattgaagtctgggtgcagtggttcacgcctataatcccagcacttttggagaccagtgtgggaagatcacatgagcccaggagtgtaagaccagcctgggccacatagggagaccctgactctacaaaaaaaagaaaaattagcagggcatggtggcatgtgtctgtggtcctaactacttaggaggctgagggaggaggatcgtttgagcccaggagatcaaggctgcagtgagccatgatcgcgccactgcactccagtctgggcaacagagtgagactgtttcaaaaacaacaaccacaaaaaattaaatatcggcaatctcatatgcattatctgctggcccacttatccatcttcacttgcccatcaatccccataactatatccctgacaattccatttactgatcaattctgtctgcagccagccagccacttccttggccacttctcatcaacatattcacccaactgcgcagtcatttctcaccaacccatcaatccatccactcacccacctgtcttcccccaacccatcaatccatccacccacccacctgtcttcccccaacccatcaatccatccacccacccacctgtcttcccccaacccatcaatccatccacccacccacctgtcttcccccaacccatcaatccatccactcacccgtcttcccccaacccatcaatccatccacccacccacctgtcttcccccaactcatctgcctctcttcccacccacccttccactgacccacccacctacttatcagcccacttactcaccattctgtacatcaattcaaatattcatgtccccacattcacctccacatctatcctctctttgttcctttcccttccttccttccctcccaagctccatccatgcattcactcactctctcacccatcaaccatcttctgaggcctcccgtctactaggtcctgggctgagatccatgcattcactcactctctcacccatcaaccatcttctgaggcctcccgtctactaggtcctgggctgagatccatgcattcactcactctctcacccatcaaccatcttctgaggcctcccgtctactaggtcctgggctgagatccagggagagagaacagtctgactgggtccctgatgtgagatcactcattgccttgggaaatgggtcttgtccaacagacatagatacagactgagactatttggtgtgattttagagagggtcccaccggggcctgtgagagcccagagcacgagcaactcactgtcttgtaggacacggaatgcctcagggagaagggaactttggtgctaggtcttgtaggatgaagaggagtctgggaggaagagaaggtagggagaggtcatgaaggtagggaaacattttgtgcaaaggctgggaagcaggagagagcctgaagtgttcagcaaaagtcaagcagcttggttcaggtgactttggggggagtgacggaagtagctggggtgtgatggccaggcggagggctggggcttcctcctgagggcagtggggagccacagaagagttctgaacatgaaagggagaaccactgatgtgggtgtcagaaataccccacaggataaaagaggacaaatagggtgcaatgtatgctgcttgggtgatgggtgtaccaaaatctcacaaatcactaccaaacagcttactcatgtaaccaaacaccacctgtttcccaataacctgtggaaataaaataaataaataaataaataaataaataaataaataaatgaaaagaaatactctgcggaccaggcatggtggctcacacctgtaatcccagcactttgggaggctgaggcgggtggatcacttaaggtcaggaattcgagaccagcctgtccaacatggcaaaaccctgtttctactaaaatacaaaaattagccaggggtggtggcgtgagcctgtagtcccagctactcgggaggctgaggcagaagaatcgcctgaacccaggaggtggaggttgtagtgagccgagatcacgccactgcactccagcctgggagacagagtgagaatctgtctcaaaaaaaaaaaaaaccaaaaaacccagtggggactgtgctgggaagaggtcagaagaccccaggaggaggctggggcaatggaccaggcgggaaacaataagacccctaaagggaaggtggcttgggtgagtcacagagccaatgagtgaagaaggcagagggacatcctcccttcctcactccctgatggcccctgtccgttcccccacccgccagggaggtggtggaggaggagaagaagaagaaaaagaaagatgacgatgacctaggcatccccccggagatttgggagctcctgaaaggggcaaagaagagcgagtacgagaaaatcgccttccagtatggcatcaccgacctccggggcatgctgaagcggctgaaaaaggctaaggtcgaggtcaagaagagtgcaggtcagccctggtctggggggagctgggccctgcacacaagggacccctagccttgtgggtgtctaatgattggaccctggacctatcttttcgaggtcccaatgaggtaggaggcaagacccaactctagcggtgggcctcggacaccagaccaaattgaggactagctaaaacagggacagggtggaagcagctttccataagacatgcccaccagtgtgccatgtcagtttaccatggccatggcaacagccaggagttactgcccctttccatggcaatgaccagaccacccaaaagttaccacccttttcctagcaatttctgtataacctgctccttaatctctaggtaattaaaagtgggtatcaatctgactgcagatctgccctgagccgttgctctctgtctctggggtagccctgttccgcaggagcagtcagagggctgtaacactgccacctcaataaagctgttttcaggctgggtgcagtggctcacgcctgtaatctcagcactttgggaggctgaggtgcgcagatcacctgacgtcaggagttcgagaccagcctggctaacatggtgaaaccccatctctactaaaaatacaaaagtcagccgggcatggtggtgtgcacctgtaatcccagcaacttgggaggctgaggcaggagaatcgcttaagccagggaggcagaggttgtggtgagctgagattacgctgtggcactccagcctggggaacagagtgagactctgtctcaaaaaaataaaataaaataaaaaataaaataaaataaaataaaataaaataaataaataaaaataaagctgttttcttctacctaacactggcttgcccttgacttctttcctgggtgaagccgataacccttgcaggctaagccccactttggggtcccctgccctgcatcaccaccagagaagttctcaaggatctctaagttcataggaggccccctgacttcctcactttgaccttggagagcccagggcctggggagggagatgtggtgcctctggggatgaccaggggaatgaggaccacacgcctccatcccctttgcatgcctcaatcttcagcattcacaaagaagctggatccagcctaccaagtggacagaggcaacaagatcaagttgatggtagagatcagcgacccagacctgaccctcaagtggttcaagaacggccaggagatcaaaccaagcagcaagtatgtgtggggtgggcagtccctgcaccggggagatccccgtccagagagaacgcccggagacaaggcctatcactcttaaccagaaagggcatattcacccctatatgaagagtacaggccgggcacagtggctcacgcctgtaatcctagcactttgggaggccgaggcgggtggatcacctaaggtcaggggttcgagaccagcctggctaacatggtgaaaccccatttctactaaaaatacaaaaaattagccgggtgtggtggcacatgtctgtagtgcctgtaatcccagctacttgggaggctgaggcaggaggatcgcttgaacccaggaggcaagaggttgcggttgcggtgagctgagatctcgccactgcactccagcctgggcgacagagtgagaccctgttaacaacaacaacaacaaacacatcacaagacaaccttttttaaattaattacctaattttgttttgagacagagtttcgctcttgttgcccaggctggagtgcaatggcatgatctcagttcactgcaacctctgcctcccaggttcaagagattctcctgcctcagcctcccaagtagctgggatgacaggagcgccccaacacatctaatttttggggtgtatttttggtagagatggggttttaccatgttgcccaggctggtcttgacctcttcaagcaatctgcctgcctcagactccaaaaatgctaggattacaggtgtgactggccctgccatggttatttaaataataggaattgctagcttggacaacatagcgagatcccatctctacaaaaaaattaaaaaattagaagataccaagaaaagagaaaaaaaaattagctgggtatggtggtgtgcacctgtgatcctagctactcaggggctgaggtgggaggatggcttggacccaggaagtctaggttgcagtgagctgtgatcgcaccactgcactctagcctgggtgacagagtgagaccctgtctcaaaagtaaataaaaataaataaataattgaaactgggccctcaatccctttccacacaatttggctctgagagagagagagagagacttgccttgagaacaggtaagcagagctaccccagggataggtggatgctccacgccctggtttgaggtgagacttttgaatcaggtacgtgtttgagaacgttggtaagaagcgaattcttaccatcaacaagtgcacgctggcggatgacgctgcctatgaagtagctgtcaaggatgagaagtgtttcaccgagctcttcgtcaaaggtgaggctggaattcagaactgagcctggagagggactggaactctggagggggtcctgaaacgactgacctcctgtccccctgccccacagaacctccagtcctaattgtcacacctcttgaggaccagcaggtgtttgtgggtgaccgggtggaaatggcagtggaggtgtcagaagagggtgcccaggtgatgtggtaagtgacccttgatccctgatctccatacaggtgcacatagtttctttgcctctgccttgatctttatgggacctcctgtgacttctcttggagatttctgacctttactcagtagtcatccccaggagatctcagcttttctctataaatccttaccttcacctaaaattgtttctagaatttctgacctctacctatcctatcctcttcagggtcgtcttcctgatctccgactgttccattaaatattcattcatctgaccaattatctattccttggtccatctatccaggtatccactcatccacccagtccatccatccatccatccatccatccatccatccatccatccatccatctgcttaaccatccatccactcatgcatccatccatccactcatccatccatccatccatccatccacttaaccatccatccatctacttaaccatctgtccatccattcatccatccatccatccatccatccatccatccatccatccatccatcccattgacccattcatccatctactcattcatatatccactcttccatttaggttgccatctagccatccatcgacctatcaatccagagatctatccatccactcactcactcacctgcatacttgcccaccatctacctatccattcatccatctatgtacctattcaccaacccaacaaatatttatcgagcacctgttgtgtggtgtactcttctacgtatcagagatataatggggagaaaaaaaatgtcaacatggccgggcgcggtggctcacgcctgtaatcctagcactttgggaggccgagacgggcggatcacgaggtcaggagatcgagaccatcttggctaacacggtgaaaccccgtttctactaaaaatacaaaaaattagccgggcgtgttggcgggcgcctgtagtcccagctacttgggaggctgaggcaggagaatggcatgaacctgggaggcggagcttgcagtgagccgagatcgcgccactgcactccaacctgggagacacagcgagactccgtctcaaaaaaaaaaaaaaaaaaaaaaaaatgtcaacatggtacctgccttcatggcatttataatctgctaatttggtgatagtggtggtggtggtgtgtgtgtatgtgtgtttgtgtaggagaaagagataggcattagtcaagtcatcacatacatacatataaaagttccattttgagactggcttgaaaggagcagtaatggatgttgtaatagcttcctaggaggaagggactcaggaggtcagggaagtcttcctggaggagatgacaattgagctgagatctgaatgacatggaggtataagtgaagagagaaggggagagtgccctggacagggaaaaccactgacagaggccacaacgtttgatgtttctctgagaccccagggcttcctctgtgcggacctctccccatgacatctttttgtgtcccctgacttccagccaataccttggtaccttgagacaattaactgtgtgtggcctgtgacttcctcctctctctcctcactgccttttttttttttttttgagacagagtctcactctgtcacccaggctggagtgcaattgcgtgatcttggctcacctcaacctctgcctcccggattcaagcaattctcctgccttagcctcctgaatagctgggattataggtgcccaccaccacacctgcctaattttttattttttattagaggtgggttttcaccatgttggccaggttggtctcgaactcctgacctcaggtgatccacacacctcagcctcccaaagggctgggattacaggcatgagccagcgtgcctggccctctctctccccttcacctgacctgtgacccgtccaccactcaagatgcctctgccactcattatgtctcctccctccggggacctgccttctgatccctctgcatgggcccccgactgactctccaagacccagaccgagagctgtgctgtctcctcacatcccgttctgtgtctcacccacctaggatgaaagatggtgtggaactgactcgggaggattccttcaaggcccggtaccgcttcaagaaggacgggaagcgccacatcctcatcttctcagacgtggtccaggaggacaggggtcgctatcaggtcataaccaatggcggccagtgtgaggccgagctgattgtggaaggtatggggcctccaggtagggcacgggctgcactgcgcatgcttctccacacagcttgaggttgctcaggccccccagtctggaagttgttcctgactcctctctttcccacacaccctatgttcagcccaccagggagatctgatggctccagcttcaaagtaaattttggatccagccaagcgtggtggctcacgcctgtaatcccagcactttgggaggccgaggcgggtggatcacttgagcttaggagttcgagaccagcctggccaacatggtgaaaccccatctctactaaaaatacaaaaaaattagctgggcattgcggcgtgcacctgtagtcccagctactcaggaggctgaggcaggagaattgcttgaacccaggaggcggaggttgcaatgagctgagattgctccactgcactccagcctgggcaacagagcaagactctgtcttaaaacaaaaacaaaaacaaaaacaaacctgggcgcggtggctcacacctgtaatcccagcactttgagagaccaaggtgggcggatcacttgaggtcgggagttcgagaccagcctggccaacatggcgaaaacccatctctactaagaatacaaaaattagctgggtgtggtggcgtgcacctgtaatcacagctactcgggaggctgaggcaggagaatcgcttgaacccaggaggtggaggttgtggtgagccgagattgcacactgcactccagcctgggcaacagagtaagactctgtctcaaaaaaaaaaaaaaaaaaattagccgagcatggtggcacacacctgtaatcccagccactcaggagtctgaggcaggcgaattgctagaatccaggaggcagaggttgcagtgagccgagattgtgccactgtgctccagcctgggtgacagagcaagactccgtcttaaaaaaaaaaaaaaaaaaatctgaaaccaaccacagcccccctgttgctgcccccgcctggcccaggccttccttccctcatgcctggactggtgcagttgtctcctctctggtcactctgtgtctatacctgccccttgacctccaccccccagtacccgccagagtgagcctcgtaaaacataagtgagatggtgaaaagaaacaggtctgtggtctgagtaacagtactgggtccatgtcagtgtcctggtttggatactggactccattatgtacgatgtcaccagtgggggaggctggatgaagagcacacgggactctatgtgctatttttgcaagctctaggggtctataattctgtaaatataaaaagtaaaaaacaacgaactcaagtcagttatgggtcaaacaaatgatggtatttccatatctagccataaaaaaagagaatgttttagactgggcatggtggctcagccctgccattccaactctttgtgaggccgaggtgggagggtaaattgagtccagaagttcaaggccggcctaggcaacatggcaagaccccgtctgtataaaaacatcaggccgggcttagtggctcactcctgtaatcccagcacttcgggaggccaaagcgggtggatcacctgaggtcaggagttcaagaccagcctggtcaacatggtgaaaccccatctctactaaaaatacaaaattagccaggcgtggtggtgcatgctagtaatcccagctacttgggaggctgaggcaggagtatcacttgtacccggggggtggagttttcagtgagccaaaatcacgccattgcagtccagcctgggcgacaagagtgaaactccatctcaaaaaaaaataaataaataaaataaaataaataaaatccccaaagtgctgggattacaggcgtgaaccactgtgcccggccacctcagggcctttgcacacgctggtccctctacctgggaggctttttttcatcttctggtagattcctccctgcctccctcaggcctcctcgctccctcctctgtttctttcttcactgtctcccactagcatgggagcttcccgaggccaacgggttgtttctgggttgtctgtggctggtatccccagtgcctagaccagcgcctggcacacagtgggtgctcacaagtgtctgtgcactgactagagtagtgacggctccttgtctttctctccctgaccagagaaacagctggaggtcctgcaggacatcgcggatctgacggtgaaggcctcagaacaagctgtgttcaagtgcgaggtgtctgatgagaaagtgacgggcaagtggtataagaatggggtcgaggtgcggcccagcaagaggatcaccatttcccatgtaggcaggtgaggagtgggctgcagaagtggctgggggtagggtgtgcatagcagttagctttagctgtgtaacaagctgtcccccatttatttttttttttgagatggagttttgctcttgttgcccaggctagagtgcaatggcgcgatctcagctcactgcaacctccgcctcccggattcaagcgattctcctgcctcagcctcccaagtagctgggatgcaccaccacgcctgactaatttttttgtatttagtaaagacagggttttgccatgttagtcaggctggtcttgaactcctgacctcaagtgatccacctgcctcagcctcccaaagtgctgggattacaggtatgagccaccacgcctggactttttcttttctttttccttttttttttttttttgagtcagagcctcacactgcaacctccaactctgaggttcaagcgattctcctgcctcagcctcctgactagctgggactacaggcatgcgccaccatgctaatttttgcatttttagtcaagacagagtttcaccatgttggccaggctggtctctaactcctgacctcagctgatccacccacctcggcctcccaaagtgctgggattacaggtgtgaaccaccgcacctgtcctgtccccaaacttagaggtttaaaaggatgaggattgggctcggagcagtgactcatacctgtaatcttggcactttgggaggccaaggcaggaggatttcttgggcccaggagttcaagaccagcctgggcaacatagtgagacactctctctaaataaataaataaataaattaggattcatttcatcttgagcgtgcaggttggttgggggctggctgatccaggatggcctcgttcttacctctgtggtggcaggacctggaccctgctgactttgcgtgggcactgtcaggacctcagctgggacagctgggcgcccagcacgccgctccctatggcacctcctcctcctccagtgagctcagcctagcacactcacgtggcagaggcagaggtcctgagagagcatggaagcaaatgagacttctgtggcccaggctggaaactggcccaatgccacttccgccatagtctgttgggcaaggaaagtcccaggccagctctgagtcaagggctgggaagcagattccaccactgatggggatgctgcaaagtcgcatttcaagggcatggacaccggcagggaaaagcctctggccatatcagctaacagtcaacatgggctccagctcagaaaacaagaagctgggattcaacaggtggcacgtggacacctaagacaaacacctggttatctgcagaatgcagagagccagcatgatgcctggagaacatcgtgccgttcagggcttcctggcaatagttcttggtgggatgtaggttttccctgtgttctgtgtagggaaccatgccggctggtggtctcagtaatgatgataatggccgggcatggtggctcacacctataatcctagcactttgggaggctgaggtgggtggatcacttgaggtcaggagttcgagaccagcctggccaacatggtgaaacccccatctctacaaaaaatacaaaaattagctgggtgttgtgttacacgcccatagtcccagctactcgggaggctggggtgggaaaatcatttgaacccaggagggggaggttgcagtgagccaagatcatgccattgcactccagcctaggtgacagagtgagactccatctcaaacaaacaaacaaaaacaacaacacataatgatgataacacatcctgacacttacagggcccttactatgtgccaggtacttttctaggtgtggtttttttcttttcttttctttttttgagacagggtctcaacctgtcacacagcctggagtgcagtggtgcaatcatagctcactgcagccttgacctgggctggagcaattctcccacctcagcctccccaagtgctgagattacaggcgtgagccaccatgcccggccaaagaacagtatctatttatttattttctgtagagacagggtcttgccgtgttgccctggctggtctcgaactcctgggctcaaacaattctcgatcctcagcttcccaaagtgctgggattacagatgtgagccactgcacctttctcgatgctttacaacaaccttgatgtagatggatatcattacccctattttatagatgaagaaacagaggcacagagaggttaagtaacttgcccaaggtcacatagctaccgatttgaaaatagaccacagcgttccaaagccctggataagaatgcaggcatgtggactgcactgagggaagctgattgaggcggtgcagccccatagtggtcccattgcaatctggttcgagccctaccctgctcccccaccccttaggttccacaagctggtgatcgatgacgtccgccccgaggatgagggagactacacgtttgtgcctgacggctacgccctgtcgctctcggccaagctcaacttcctgggtgaggatgccccttcctccttccctgggggctgtaggatccaccctcgcagacccagggcccgggatgtccctctccaggattaaggttccccgagtgcgaatgaggacgacagcaagcgtctgtcccgctcatggctggagtcagaagatggagggagagcgctgaactcgctgccacctgccgcccgggaggaggggtggctcctgggcctgaacctgtctccagcaccccagttcccagggagactgccagaccctgtcacctcttcctctgggctgtgaaggtggggtgaggggcctgctgagtttagacctaactgtccagtcttctttgtcttgcagaaatcaaggtggagtacgttcccaagcaaggtgagcaccacgggctgcgctgggagcgggtctgagggaggagggaccgggctgagggaggaggggaatggccgagggaggataggcagggcgaggaaggatgggcggggtgcgggaggatgagtggggagaggaaggagggggttggggtgctgaggaagggagggaggaggggcggggagctgacagacggggtgggggctatcggccgagaggagggactgaggtcctgagggaagagggattggggacctggatccctgggtctgagggaggaggggctgggggcctagactgtagggtgtgagggaggaggggttggggacctggatccctgggtatgagggaggaggggctgggggcctagactgtagggtctgagggaggaggggttgggggcctggactactgggtctgagggaggagggcttcaggacatggatccctgtgtctctgtcactgttggaacccaactttttggagattctcttgtgggaactgggaaggcccagcctcccactcccagggtccctgtatctcttctgtgccaccagagccaccaaagatccacttggattgctcggggaagacctcagagaatgcgattgtggttgtggctggaaacaagctgaggcttgacgtgtccatcacaggggagccccctcccgtcgctacctggctgaagggagatgaggtgggttggggccgcccctctgtcctcactccctttccgtttaggcaagtctctttccccctgagcctgagtttcatcctctataaaatgagggtgatggttccttcttcacagggttgttttgaagattagagattatgtttgtccatcacaggtatgggcctagcacatggtggatgctccatccattcatccattcacctttcagttaattaatcaagtgatcgaccagtttaggcttccagccagccagtaactcatccgcccatccagctgatgattttttcatcaactaattggttaattcacccagccatccactcgtccagtaattaatctgtttgtccatttatccatcaaccaatttagttatccattcatccagaaacacatcatttacccacttcaatctatctatataatctatctaatctatctatctgtctatctatctatgtatctgtgtatgtatgtatgtatgtatgtatgtatgtatgtatgtatgtatctatctatctatctatctatctatctatgtatctatctatctatctatgtatctatatttttgaaaggtggaatctcactctgtcacccaggctggagtgcagtggcgtagtcttggctcacggaaacctccacctcccaggctcaagtgatcctcccacctcagcctcttgagtagctgggaccacaaaagtgtgccaccatgcctcgctaattttttgtatttttgtagggacagggtttcaccatgttgcccgggctgggctcaaactcctgaactcaaacgatccttccaccttggcctcccaaagtgttgggattatgggcatgagccaacatgcccagccatatctatatattcctctatccatccgtccaacaaatattttaaccttgcatgtcccaggccctgggacagctcgatttttcatttcttctctgtgcttccatttcctcttctgtaaaatggacagacttgctcaacatccatccatttgctcactcagcgtacatcccctaaagttttctccgcaccaggcactgaggatgcaaccatgagttggatgcggctcctgccctccaagagccttcattttacttaaaatttatttatttatttttaaatttgagacagggtttcactatgttgcccatgctggtcttgaactcctgggcttgggtggcactcctgcatcagcctcccaaagtgctgggattacgggcatgagctacctcaccctgctcagtagcctttactcttgcggagacgcaaacacctgcccaagaagccacagtccagggtgctctggctgagataaagggaggttctagaagctatgagaacccaggggctggagccagcacttccagctaagggtatccaggaaggcttcctggaagaggtgtcttctgggtgcttcctgaaggatgaggaagagcttagtgttgcatgcacagggaccagccttgcaaaatctctgggacaaggcagtcttttttttgttgttgttgttgtttggttggtttctttttttctcttttttttttgagatggagttttgctcttgttgcccaggctggagtgcagtggtgttatcttggctcaccacaacctccgcctcctgggttcaagcgattcttctgcctcagcctcctgagtagctgggattacaggcatgcaccaccaggcccggctaattttgtatttttagtagagatggggtttcaccatgttggccaggctggtcgcaaactcccaacctcagttgatctacccgcctcggcctcccaaagtgctgggattacaggtgtgagccactgcgccccgtccagtctggtgcttttaatgaaggacggcatttggagggcgaggagggcagtggagcgagtgaggactctgtgtgttgatggggaatcatgggaggattctgagcaggggaatggcagaggcaggcctgggtttgcttggggacacgatggggtgcaaggccatctggtggctgcgttcaggtattcacgaccaccgagggcaggacccgcatcgagaagcgggtggactgcagcagctttgtgattgagagtgcgcagcgggaagacgagggccgctacaccatcaaggtcaccaaccccgtcggcgaggacgtggcttccatcttcctgcaagttgtaggtgagcagagaaagccgaggtggctgggccaaggggtgactccctgaggcctcgaggggccacctgactctcctgccccctgcagatgtcccagaccccccggaggctgtgcgcatcacctcggttggagaggattgggccatccttgtctgggagccaccaatgtacgatggggggaagccagtcaccggtgagtgcctctgtcctcatgacctctgaccttccctctttctgccttctgtttttttttttttttttttttttgagatggagtctcactctatcgcccaggctggagtgcagtggctcaatctcggctcactgcaacctctgcctcctgggtacaagcaattctcctgcctcagcctcgcaagtaactgggattacaggtgcccaccaccacgcccggctaatttttgtatttttagtagagatggggttttaccatgttggccaggctggttttgaactcctgaccccaagtgatctgcccacttcagactcccaaagtgctgggattacaggtgtcagccacggcaccagcctctgccttctccttgacctcccagagcccttagcatcctcagtgacctacctctgacccctgattttccattttcccatctcaatccctttggtcttcccgcttcctttactcgctggtgacctgggaattctcactttgaccagtagcctgggtttttctatggctcctggcctcctggttcatgagctgtgaccccctcttgattcctgactccaggactggtggcctctgaatgctctgtggcccctgagatccacctaagattcatggcctcggaccgccctggccatgcgatcctctggatgtggccctcactcccccagctgactcatgccccatgccctcccgttccctcttctcctctctgcttggagcctccagggtacctcgtagagcggaagaagaagggctctcagcgctggatgaagctgaactttgaggtcttcacagagaccacctatgagtccaccaagatgatcgagggcatcctctatgagatgcgtgtcttcgccgtcaatgctataggggtctcccagcccagcatgaacaccaagccttttatgcctattggtaatgtcctccctcacttttatgcctattggtaatgatggatcactctgatccatcaaccccgtccacctctggcccatcttttgcccgccatcaatctctgaccctaccccctggccttctgaccaatcattctacctctgactcctgccccttcctgctgacccctgacccctcattccccccatatcctctttttctggatgcttgcagcacccacgagtgaacccctgcacctgatagtggaggatgtgacagacaccaccaccacactcaagtggaggcctccgaacaggatcggggcaggtggcatcgatgggtacctggtggagtactgcctggaaggctgtgagtgaccctggcagggctggtgggggtggtggctagcacaggtgggtatccagtccagggagctgaaaataggaccatgtgggacagagatgggtgcagtggcctgcttgtgttttgtgtctgtactgttataagtctctgggatgggacccccctgtgactagtgtgttttctctcccttcttcctttctacatccatcctccatacagcagtgactttctgtcattccatctatccttccatccccccatttatcttttatcttttacctttatgccttctttctttcttctactcatttatccatctaaccaatctttccttcatccatcttaacatccacccatccatccatctgtccatccatctgtccacccatctgtacatccatccatccatatttccatccatccatccatccattcatcttaccgtccatccatccatccatccatccatccatccatccatccatcatttccatccatccatccacccacccacccactcatatttccatctatccatccatccatccatccatttatccatccatccacccatccatatttccatctattcatccatccatccatccatccatccatccatccctccatttgtccatctgtccacctgtccatcatccatccatccatccatccatctgtccatccatccatccgtctgtccatccatctgtccatccatccatctgtccatccatctatccatccatccatccatccatccatctgtccatatttccttcgtttctctctctctctttttttttttttttgagacagagtcttgctctgttgcccaggctagagtgcagtggcacgattggctcactgcaagctccaccttccaggttcacgccattctcctgcctcagcctcccaagtagctgggactacagatgcctgcaaccatgcccagctaattttttttttttgtatttttagtagagacagggtttcactgtgttagccaggatggtcttgatcttctgacctcgtgatccacctgcctcggcctcccaaagtgctgggattacaggcatgagccatcgcacccggcccagtatcattttttcatccatatatctatctcttcaccactatctttgcttccttccctctttctacctatatggccatccaaccatctgtccacctaaccagccattgtctctctgcctgtccatccatcatctgtacctccatacatccactctccatcctccaccaaacaaacattcactgagcactgacttgtgcccggcccagtgccatggctatggagatgtctcagacgcagccatctctctgggagaacagacgtgatcacctcgacacactatcccaggtcttaaagtcagacagatgcgggttccaaccttgcccctccactgtctaactgtgtgtccttgggcaagtctctgagcctcagtctcttcatctaaccatggcgaagacagttctcatcttgacagggtacagtgacgatgtactcgagaatgcatggaaaggagggatggttgaaccctcatcagcttcctccctcctcctctcctccgtgctctttaccccattcctccctggccggctgctcccaccctgacgtttcagaacccagcttgttagagttcactctgttgattgctgctctgagccaacagccatgagttccccagcccatggccataaacccaagacagaagggcatgtaacgaaaagcaggcaatctgaagagctctgaccctgccctcagcccgccttcccagacacccacctggctgcgccctcagacagagccaagatccctgcccctctgtgccagccttgcaggagagcagagcttgagagcgtgctggagtcagacaggcctgggtttaacatcctagtccacagagcctgagctgcgtgtccaggatggtcttgaattcctgggcttgagagatcctcctgccttggcttcccaaagtgctgggattacaggcatgagccatggtacctggggaaagtttttttttttttttttttgatggagtcttggtctgtcgcccaggctggaatgcagtggggtgatctcggctcactgcaacctctgcctcccaggttcaagcgattctcctgcctcagcctcctgagtagctgggattacaggtgcctgccaccttgcccggctaagtattgtgtttttaatagagacagggtttcgccatgttggccaggctggtcttgaactcctggactcaagtgatctgcccacctcagcctcccgaagtgctgggattacaagcatgagccacgggattacaagcatgttagggatggtttcccatccttaacatggggatagcacagggttgaggtaagaattaatgaacaacgcctataatcccagcactttgggaggccgaggtgggcggatcacgaggtcaggagttcaagagcatcctggccaacatggtgaaaccccatctctattaaaaatacaaaaattagctgggcgtggtggtgcgagcctgtagtcccagctactcaggaggctgaggcaggagaattacttgaacctgggaggcggaggttgcagtgagccaagatcttgccattgccctgcagcctgggcgacagggcgagactccacctaaaaaaaaaaaaaaaagaattcgtcccactgcactccagcctgggcgacagggcgagactccgtttaaaaaaaaaaaaaattaatgagcgaacagaatggccacccttagaacctggccatgatgaatgcttaactaactccagctgctgctgctgcttctactgggaacttactcagtgctcactcgctcgctgcgtggggcccaagtccccgggagaaacgggagcggaggatgggaggagggcacgagatccgccagcagggcctctctctccagccgaggaatgggtccctgccaacaccgagcccgtggagcgctgtggcttcaccgtcaagaatctcccgaccggagccagaatcctcttccgagtagttggggtcaacatcgcggggcgcagcgagccggccaccctggcccagccggtcaccatcagggagattgcgggtgcgtggcccctgaccctgcgctccgaaagaccaagctggcgtcgtcccgcctgccctttccgtgtcgtcgacaggacctccccagagagccttatcaccattggcccctggaatgcgccccggccccccgctgagccccctccctgtgtttgcgccctcagagccacccaagatccggcttccccgccatctccgccagacctacatccgcaaagtgggcgagcagctcaaccttgtcgtccccttccaggtcaggggagcggggtcacgggccgggggtccgctctcgccgcaagccccctttttgcgggtggagccccgctgaccccaccccgccccgccctctccccgcagggaaagccccggccccaggtggtgtggaccaagggcggggccccgctggacacctcccgcgtgcacgtgcggaccagcgacttcgacaccgtgttcttcgtgcgccaggcggcccgctccgactccggggagtacgagctgagcgtgcagatcgagaacatgaaggacaccgccaccatccgcatccgcgttgtgggtgcgcgcgctggggagggcccctggaggccgggaggggcagggatgggcagcgatgggggaggaggtaagagatgaggggtggggaaggaggtgggagatgaagggtgggagaggaggtgagatgagggatgggagaggaggtgagagatggggggtgggagaggaggtgagagatgaggggtgggagaggaggtgagatgggggtgggagaggaggtgagagatgggggggtgggagaggaggtgagagatggtgggagaggaggtgagagatggtgggagaggaggtgagagatggggggtaggagaggaggtgagacgaggggtgggagaggaggtgagagatgagggatgggagaggaggtgaggagatgaggaggggagggggagaggaggtgaaaagatgaggtgggggagactagataaggagcaaggcaagtaccagggctaggagtggaggagagatgaagatgggggaacccttgagagggagattgggtgaagagaggaagtggggagacatgggggtgaggagaggaggtgaggagggatgagggtggcccaggataagaggaagtggagagactgggatgggggaggccataggcaggaatgggaatggggcataagagaggttagaatcaggagggagggggtgtggagaggggaggggagggaagcggctggacatcccaaaacctggactgacttgtcacacttccccatttccagaaaaggctgggccccccataaacgtgatggtgaaggaggtgtggggcacgaacgcgctggtggagtggcaggcccccaaagatgatgggaacagtgagatcatggggtatttcgtccagaaagcagacaaaaaaaccatggtgagagagcagagggggagatggggaagagccggtgaggtgggcagagcaggtgcagatgtcccccgttcacagctggaagggcagggaggggcccagaggctagaggacgggctggggccaggagggaagccttttagctgagacttggcacgtgatgggttttcattttcttttttcactgaggtaaacgtcacataacggaattagtcattcatcgttttaaagcgaacaattcagcagcacttaggacatctgcagggttgtgcagccaccgcctctacccagtccattttcatcccccagaggaagccctgtacccaatagcgctaccccctggtctcccctggcagccaccgatttgctttctgtctccctggatttacctactctggacatttcatacacatggaatcctagctatgtgacccttgtgtctgactttgttagctcagcacaacgtctttgaagttcatccatgctgcagggtgccgggtgtgtccatgcagaaatcctgtttttagaattcttttttttgagacagggtcttactctgtcacccaggctggagtgcagtggtgcaatcttggctcactgccttctctgcctctgagctcaggtgattcccccccatctcagcctcccatgtagctgggaatacaggcacgtgccaccacatcccgctaatttttgtagagacagggtctcagtatgttgtccaggctggtctcgaactcctggacccaagtcatcctcccaccttggcctcccaaagtgttgggattacaggcatgagccactgcacctggcctttatttcttttaaattttttttttttttttgagacagggtcttactctgtcacccaagctggaatgcagtggcatgatcatggctcactgcagcctccaacccgcaggttcaggcaatcctcctccctcagcctcccaagtagctgggactacaggtgctggccaccagacctggctaattttttgatttttttaacagacaagggtctcgccgggttgcccactctggtctcaaactcccaggctcaagcgagcctcccacctcggcctcccaaagagctgggattacaggcatgagccacggtgcctgaccccttcttagcgttgaatgatgttcctttgtctgggccgactgttttgtttgtccatccctgcgctgatgggcgctgggttggttccacctgttggccactgtgagtagtgcgccatgagtgacatttttttaaacactggatgtgcttttctcaccccttctttcgtctgtgtcttgtgtgtaatcgtgtgatcctgtggccccgacccgcctggtccctccctgtccccacactaggagtggttcaacgtctatgaacgtaacaggcacactagctgtactgtgtccgaccttatcgtgggcaatgaatactatttccgagtttacaccgagaacatctgtgggctcagtgactcacctggtgtctccaagaacacggcccgcatcctcaagacaggtacagccatcctgccccacagcccaggcccaccccgtccaccctctcgcccaggtcccacctggactcctgccctcccctccccactggggttgacggcacctagtcatgggagagaggtgattgcggtttgttccctggttggtgtcaggggagaatctagatcagtcgccttacgggtgcatcctctctccccaggaatcaccttcaaaccgttcgagtataaggagcatgacttccggatggctcccaagttcctgacacctctcatagaccgcgtggtcgtggctgggtactcggcagccctcaactgtgctgtcagaggccacccgaaggtgccagggcagggacccagatctgcgtgtgtgttgccttgtggggaatcttccatacaatgaagcccactccccatcacgccagttcttcttccccgagttctctgtctcaagggatttagtcacttaaaaaatttttttaattgatttttgattttttttttttttgagacagggtcttgctgtatcacccaggctggagtgcagtggcacgatcacagctcactgcaactttgacctcctgggttcaagtgatcctcctacctcatcctcccgagtagctgggaccacaggcatgaaccactgtggccagctaattttataatttgtagagatggggtcttgctatgttgtccaggctggtcttgaactcctaggctcaagtgattctcccgcctcggcctcccaaagtgctgggattacaggtgtgagccaccacgcccagactggacttgctcacttttcacccacttcctgttagctcctctgaccagagcccaagtctcagacaatcaatcacatcttgcctttggcttcctgcctttttccttctttctttctttttttttctttctttcctgagaccaggctggagtgcagtggtgcgatcttggctcactgcaaccgcctcccaagttcaagcgattctcctgtctcagcctcctgagtagctaggattacaggcgtgcaccaccatgcccagctaaattttgtatttttagtagagacggcgttttgctgacctcaggtgatccgcctgcctcagcctcccaaagtgctgggattacaggcatgagccaccgctcctggcctcttgcctttttctttgtcccctgactgccaggtaacagcttgtctcggcagcttgaggagaggaccattaagtctctcttgctctgtccaaggacaaatgccagtcccatggaaaaagaaacgttgggagcaggggcagcctagaccagcacggctccccagggtcttcctgtccagccattttccaactgctctttgtgaacagggacacttgcaacctagagctcatttagaccaggggttggcaaaccatcacccatgggtcaaatccacccaccacctgtttctctcaataaagttttattggaacacgggccaagcatatttgtttatgttttgtttacagctactgcagacaaaatgtaaataaatgtgcgtggctcgcgttccaggcccagagactacagggcccaaaaagcctgaattatttaccatctggtcctttataggaacagtttgccagcttctggtctgggctgtaggttattcgcttcagcctccttaaggcataccatgtctccatctctgtatactgtattcactaactccactcattcatgtcactcattccactcatttatccacctaccaatccatccatttactcagttcattccttcactccatttgcttatttacagcactgtttcgtgctctcattcatttattcactccatttattcttacaacaaacattttcagaggctttcaatgacctgggtgattcgaacaagaaatttcctgtatgttgggggagactgacatttgcccagagtcacataaataatataaaattatgaagggctgggccagacacggtggctcacacctgtaatcccagcactttgggaggccgaggcgggcagatcacctgaggtcaggagtttgagaccagcctggccaacatggtgaaaccccatctctactaaaaatacaaaaactagccaggcatggtggcaggcgcctctaatcccaaccacttgggaagctgaggcaggataattgcttaaacccgggaggtggaggttacagtgagccaagatcacgccactgcactccagcctgggagacaaagcgagattctgtctcaaaaaaaaaaaaaaaagggaagggcactatggaagagggaacagccagtgccagcgtcctgaggtgggtgcctgtctggtctgtttgaaggacagtgaggtagcctgtttggctggagcagagaagtaatgggggtcaaagagtgtgggaccctgtgggccactacaaacagtgagctctttgtcctgagagcaatgggaagaccccaccgttaccctgtgaagtgggattatcaacctgcttttacataagaggagactgagggtcagggagaagtgactcgtccaagaacatctggcaagagggtggcagagcctagaacccagatcggcttcctgagccccattttgtcatcattgcccagggtctctctctaagttggcctcctctcccttgactctcaacagccgaaggtggtctggatgaagaacaagatggaaatccgtgaagatcccaagttcctgataaccaattaccaaggagtcctgacgctgaacatccgtcgcccctcgcccttcgacgctgggacttacacctgccgggccgtcaacgagctgggcgaggcgctggctgagtgcaagctggaggtccgaggtgagggcgtggccatccccaacactggctgacccttgctcgggccctgtgccagcctggccggtggccccgggctgagcaccgctgagatctggagacgagtgagaccagccctctgggaggaggactgggaagctgctgtcctgaaggcagcacagggcatcctaggagttggggttggggagcccctgacccagcttgggaaggagtcagatttttccaaaggagttgaaggacaaggaagaggaaggctgagtgagaagggcttaggaaacgtccccaaggcctccagtgtacctgggcccccgtaggcagatgggttgacagagtgagagcaaatatggataacacggatgaccaggggtggcgggagctcccaagagtgcctccctccatagcctgtccccatgctcccacccacctgcccctgcctctccctgccccgtccctcatctcggtcccacagctccagccccagcgaaagctacatcctcttcctcccatattccatttccagccgcctccgtctccagtctctccctcctgccagccactttcacccttggactctggccccagagagctctctctatccagagctgctctgccccagccctgatcccagcccgctggggactccccaccgccccagcgcccctccgcctggtgttcacggtggtgtgtccaccccggttcttcccacatgatgtcccagccacaccgggctgttggcagttacactggccaggctttcctgccacagggacttggcacatgctcttccctcttcctggaacacaattcccccgctcctttaccctgggctccggcccatcagatgtctgccagtcaaggctcagcgaggaggccactaaccgtgtccctcagagcaggatgacatcaatgtggacttccagagtccctcccggatggtgacttctgacctctgacttccctggctctgaggacagcccagcagacagggtggctggggacccttaacaaaggctcagagaggacactttctagccaagcacggtggctctcgcctgtaatcccagcacattgggaggccaaggcaggcgagttgcttgagcccaggagttcaagaccagcctgggcaacatggcgaaaccctgtctctactaaaaatacaaaaaaatttagccgggcctggtggcacatgcctgttgtcccagctacctggggggctggggcaggaggatcacttgaaccagggaggccgaggctgcagtgagctgagatggcaccactgcactccagcctggtgcaacagagtgagactctgtctcaaaaaccaaacaaaaacaccccagatcactgcccttccaagcccacccaatttctgatactctgctgtctccctgattaactattaaatcagctcagaaaaatcccagcctcaggattccagtgaccgcgtacagccagcagctcagaatgtccccatctgggatccaaaataccagtaatcaggagcactgtgactctgggttgtccagccacagtggcctaggatggggcgggatggtgaccgtcatcctgtccccctgctggtcatgtggatgcagctcctcctcctggggcttcaggaggaggcgtgcccgggcctggctcacccgctttctcgttttcctgcagtgccgcagtgagacctgtcccctacctgccaagacaattggtggtggagtcctgaccccaatccccaacctcccaggactgtgttctttctggagttttcgctgagaacaaaacagtgttgtctggaccctggagtgtctgtccttcttgactccgtagctccgtcttcctcctgcaggggattggtcaccccggggttggcgacgggagcagctgcgtcgacacaggccgcggtgaggtggcctcttggaatagctactttagcgaggcagccacgttgtcacagcaaccacagagcatcagaggtgaacccaagcccacggggaggccggccccagagaagctgctgggagggagggagggtgcaggctaggggcaacgacagtggcagcgagtcaaagacacacccaggccacacccagaaggccactctaccgaagcagctgtgtcgctgtggccgcctctaggccttggcagcggccccaagagctagacgtggtgaaccgaagagggaggcagccgtactggacaaactcctgccaggcagctgcgcggacttggtgacgaaggcgaaaccgctcgtggcctgcttgttggttcttaatggactgacctttattaactttaatatctcatctgcccggccctgaggcaaggtactttgatctctggtcattcggtgaccttgaaggatgctggaagactcagagtccccagagttcagaggtcttggggtcaagtctggcttccacgccttggggctggggagagagagtttgtttcagaggccttggcctgcagttagggagtgagggggcggggagggactttgcacttactggaatggcaggggaagccaggtgtcctaagagggggcacagattccagtgcccccagcttctaaaactggcatcatcccctgctccaccttgacccccaaggccctacagagaactggacattgggcctggctgaccccactccttcagggcacaggttgtccctctctagaccctactctggtatgtcacggggagaggggctggggcacgggtgtgggtggctgtgtgtgttcccaagtaggatacgacagcccccttggctaggggtgccaaggccctggagagactgctggcttctacccacagacccccatatccctgggtcacctctacttccagaaccaggagtccaggccccagcccctcctccctcagacccaggagtccaggaccccagccctcatctccctcagacccaggagtccaggacccaagctctctcctctcttagacctgggagtcctcagacacctcccctctgccctctgctgccccactgcgcttcccccctctcctcacctcctcccactccctctgggcctccacctcatcatcatcaccctccccatctacatcctccagcacctcttactcctgcgtgaagggcacagcagaagcagagaggaagcgcaggcggtagagcagccgcacccactggccgaactctcggtctcgggtcttgagtggggcccgcagctgcaagtagaaggtgcggctggtgttcaacttgacctcgagctgacaccggcttttgtcgtggacaaagagctggacgaacttcaaggggaacagcctgggtgggaggaaggggcggcctcaggttctgaccctgtcgggtcctccagcaccgtcggggtcaggggtccccaccttgccacccctccctctgccccacgaatccctttccactttcattgcctcttgaacttgagtccattcccaactttcttccagccacatgtctcctttttgtctcccactagtcctctcccctaaactccagactcgaatatacaactgcctacttgaaatttccatctggggccaggcgtggtggctcacgcctgtgatcccagccctttgggaggctgaggcaggaggatcacctgaggtcaggagttcgagaccagcctggccaacatggtggaaccccatctctactaaaaatagtaaaaattagccgggcgtggtagtgggtacctataatcccagctactttggaggctgaggcaggagaattgcttcaacctgggaggcggaggttgcagtgagccgagatcacgccactgcactccagcctgggcgacagagagagggactgtgtctcaaaaaaaaaaaaaaaaaaaaaaaaatcccatcttgggtgtgggatctaccatccgactcataacatgttcaacagcccacttctcaagctccctcagcccctcacacgcagcctactcctcttggtcttccctgtcttagctacatccccctcttgcttggtcaaaatcttggagtcgctgtggactccatgttctcacaccctgatgagtcctgacaccacatcctggtggctccactattttttgttggtttttgagatagagggtctcactctgttgctcaggctggagtgcagtggcacggtcatagctcactgcagcctcaacatcttgggctcaagcaatcctcttgcctcggcctccagagcagctgggactatacgcgcaccaccatgcctggctaatttttctatttttatatagtagagatggggtttcaccatgttggccaggctggtctccaactcctgggctcaagtgatcctctcgtctctcaaagtgccgggattataggcatgagccacctcactttgcctgccacctttaaaatgtatccacaatccaaactcttttaactccctcctccgccacccttgcgtccagccacctgcctcagccctcagtccctacagtctgttccccacaagtcccccagaaggcgcaggtcaacaccttgggcagtttgggtccctctgctcagagccttcctgtggctctggctcaacaggaataaacacaaagccctcaccgtggcccacagacctgcagagccccttgctccctctctgccctcacctcctgcacctccagccacactggcctccctgctgttccatgaacacaccaggctcagtccgaccctagcacctttgcacagatggttccctccacctgaaaagccctttctccaggcaagacccgccccctcatcgccctgtgtttcaggaggcatgttctcagggatgtctcccctggcctatttcaaccacatccaccctgttgagacttccccgtagtcctttccggtctgacggagccccacaggccttgcccatctaacaaatggccacctgttccctctgcctgcctggtagagtgggagctcctggagggcagggagttcctggaggcctgctttgtccagtggtgaaagtttccctggtacccgcagctgacacgtggcaggtgctcagtggatgcttcagtggatgctttttgagtatcttggtaaattgattgctcaggcccgcagcccgatttaaggtccaacagggcagagcaggaagcagtcaggaaagagtgaggatcttggctcaggtcacacagccaggattggagcccaggtcccatgttcacctacaacactgagtagccaggtggcctctctggtccagcagtatcactgccaggaatggatctcacagacaccctcacacctgtgcacagacacatatgcgcggatgtcccctgccacaccgcctgtaaccgagatgccaacaaaccccagtgtccctcagtgggtgacttgatttttgtcccccaaatagaagaataacagctgacatttgtggagcacttactcagagccagttgctattatatttacccagtttttcccccgacaaccttatggggtgtgctctcctcttatccctgtcatccagatgaggaaactgaggcacaggcaggtaggttgagcttggccaaagccagtgatgaagtaacgccaggatttgaaaccaagccgtctgagggcaggcatttgtttaaggacgttgcctaccactttaacatgaggaggctggacacagcttggtgtctaagacagcagagcacgtgcaatggtcaaaaagaatccaactgtgcaggctgtgcacggtggctcaggcctgtaatcgcagcactttgggaggccgaggcaggcggatcacctgaagtcaggagtttgagaccagcctgaccaacatggcaaaaccctgtctctactaaaaatacaaaattagctgggtgtggtggcacatgccagtaatcccagctacttgggaggctgaggcaggagaatttcttgaacctgggaggcggaggttgcagtgagccaagatcatgccactacactccagcctgggcaacaagagtgaggctccgtctcaaaaaaaaaaaagagtccaattgtgcaaatatgtctgaaagagtgtggtggctgtgctcatggcaatacaaaacggatatgggtgtcgtgctgacgagggggtgggcgcagggagaagtggcgtatggcttgtggctactgctgtttttttttttttttgagatggagtctcgcactgtttcccgggctggagtgtaatggcgcgatcttggctcactgcaacctccacctcctcggttcaagtgattctcctgcctcagcctcccgagtagctgggattacaggcgcccgccaccatgcccggctaatttttgtattttttagtagagagggggtttcactatgttggccaggttggtctcaaactcctgacctcgtgatccacccgcctcggcctcccaaagtgctggaattacaggtgtgaccaccgcgcccagcctgtggctactgctttttattttattttttgagaaagggtcctgttcccattgcccaggctggaatggagtggcgtgattacagctcactgcagcctggacctgctgggctcaagcaatcctcccacctcagcctcctaagtagctgggactacaggcacaccccaccatccctggctaatgtttgtatttttagtagagatggggtctcactatgttgcccaggctggtctccaactcctgggcttaagcagtcctcccaccttggcctcccaaatgctgggattacaggtgtgagccactgcacccagccttctactgctggtttgtttgttttgagatagtgtcttgctttgtcacccaggctggagtgcagtggtgagatcttggccactgcaacctccgactcctgggctcaaatgattctcctgcctcagcctcctgagtagctgggactacaggcgcccatcatcatgtctggctaattttttgtatttttgtagagatagggtctcaccatgttggccaggctggtctcaaactcctggcaatcaggtgatctgcccacctcagcctcccaaagtgctgggattacaggtgtgagccatcacacccagcctctactgctgtttttaaagaaaggatggatccatatatatgtgtgtatatatatgtgtgtatacatgtgtgtatatacgcatacatgcacgtgtgtgtatacgcatacatgcacgtgtgtgtatacgcatacatgcacgtgtgtgtatacgcatacatgcacgtgtgtgtatacgcatacatgcatgtgtatacgcatacatacctgtgtgtatacgcatacatgcatgtgtatacgcatacatacctgtgtgtatacgcatacatatctgtgtgcatacgcatacatacatgtgtatatgtatgcatacatgtgtgtatatgtatgcatacatgtatgtgtgtatatgtgtatatacatgtatgtgtgtaagtatatatacatgtatgtatgtatatatacatgtatgtgtgtatatgtatatatacgtgtatgtatatatacgtgtgtatatgtatatgtacgtgtgtgtatatgtatatatacgtgtgtgtatatgtgtatatatacatgtgtgtatatgtatatgtatatatacgtgtgtatatgtatatatacgtgtgtatatgtatgtatacgtgtgtatatgtatgtatacgtgtgtatatgtatgtatacatgtatgtgtgcatgtatatacatgtgtgtatgtatatatacatgtatgtgtgtattatatatacatgtatgtgtgtatatatgtatatatacatgtatgtgtgtatatatgtatatatacatgtatgtgtgtatatatatatctctctgtcagaaactgccccagaatagctcagggctggaagttggttagacagaagtgaggggctaggaggtgagtcctgaggccaaatttgcagagcaagctcaatgttctcacttcagtggtatgttcatttgggaaggggttttagggtgccaaaggagcttatgagagggtcatagccactctcagcaccatcattggtgttcttccaactgcaggtcatgattcagtgagtgatgagatcaattggtgaaatacagttagcatttaaaataaaaggggctgggcaaggtgggtcacacgtatagtcccagcactttgggaggttgagggaggaggattgcttgagcccaggagttcgagaccagcttgggcagcatggtgagacctgtctctacaaaaaaatacaaaaattagccaggtgtgggtggtgcacacctgtagtcccagctactcaggcagctgaggtgggaggatcgcttgcgcctgcagagaactgtgatcactccagcctggatgacagagtgagaccctgtctcaaaattaaatgaatgaatgaataaataaaggccaggcacagtggctcatgcctgtaatcctagtgctttgggaggctgaggtgggaggatcacttgaggcccggagttcaagaccagcctgggcaacatagtgagatcccacctctacaacacataaacaaaaataaaggtatagtgtagaagagaaaatatctcagggtactgtactggtgtcagaatactcctttgtgaaaggtttttaacttaggcagggggattaataaaggctgtaagtcatctcgagtacatgcaggtcaaaatctgatttggccacgaaattagaaaagcaatcttttggatttcagaaatgcagagaaggaactgtggaccttcatgtgtgcatgtgtgagacaatgtgagtttgtccttccttccttccctccttcctctatttctccctccttactttcttccctttcttcttttctctgtcttctttcttccctctctttctttcttttttagagaacgggtctcacttcattgcccaggctggagtgcagtggtgtgatcacagttcactgcagcctcgaactcctgggctcaagtgatcctcctggctcagccccagtagctaggaccacatgtatgtgtcaccatacctggctagctttgtaattttgatttttgtagagatgggggtcttgctatgttgcccaggctggtcttgaactccaagcctgaagtaatcctcccacctcagcctcccaaagtgctgggattacaggcatgagtcaccatacccggcatctctctttcatgaactgtgagatgtggtcaaaaaagtgaaagccagacaggcatggtagctcatgcctgtaatcccagcactttgggaggcccaggcaggcagatcacctgaggtcaggagttcgagaccagcctggccaacatggtgaaaccccgtctctactaaaaatacaaaaattagctgggcgtggtggcaggctcctgtaatcccagctactcaggaggctgaggcaggagaattgcttgaacccaggaggcagaggttgcagtgagccgaggttgtgccactgcactccagcctggagactctgtctcaaaaaaacaaacaacaaaaaaagtgaaagctactggcagaatgtttctgtactgtaggcatgtaaacatttcagtgtttgtagctggagttggggcaggagccttgggtgagaaaaaggaacagcttctgctgtctattttgtgcttgttttctcgtttgtttgcattactttttcttttctcttttcttttcttttttattctctctttttttttttgagacagagtctcactcattctgttacccaggttggagtgcagtgggatgatctcggctcactgcaacctccacctcttgggttcaagcaattctcctgcctcagcctcccgagtagctgggattaccggcgcccgccaccacacctggctaatttttttttttttttttgagatggagtctcgctctgtcgcccaggctggagtgcagtggcgcaatctcagctcactgcaacctccgcctcctgggttcacgccattctcctgcctcagcctcccgagtagctgggactacaggcgctcaccaccacgcccgactaattttttgtatttttagtagagacggggtttcactgtgttagccaggatggtctcgttctcttgacctcgtgatccacccacctcagcctcccaaagtgctgggattacaagcgtgagccaccgcacccggccctggctaattttttgtatttctggtagagacagggttttgctatgttggccagaccggtctcaaattcctggcctcaaatgatctgcctgccttggcctcccaaagtgctgggattacaggtgtgggccaccgcacccgatctgcattactttttcaatgaaaaaatatgacgtaaaggggcagtgtggagtgaggcacaggagggctcaagaaccatgagatccacaatcatgacaagcttggcattccaatcctggcccactctggagccacagtgggaccctgggcaactggctcccggctctctgagcctcagtttagctctttggcggatggggctaagggaccccaccatgtgaagatatgaggtcagaggtgagatcgtatgcgcggcctaggggcgtctggcatgagcaggccctgcggaaatgatcattctcctgaccgctgctggggcatggctgaggactgtccccttcaggtctgtctaatctctgatttctggcccctgagggctgctctgtccttgttctcccgggtagatggcagctcagggagggccggtagcactgccagctcctggccctgggggtggtctggacgaggggaggtactgctgggggctcaggtgcctggagctgagggaggaaggggtctcggctgaggtgggggcagttacccgaagagttgcaggtgtccgttctccttggcagggccggccagaagcaataggtccgggagctccagggctggactggaggctgccacccccatggtgacctcgttggcaacttctcccaaccgagtcacctggggccagaggtcagaggtcggggcaggatagatgtcggggcagaactgaggagggatcagaggttaggaatcttggtaggggaaaaggtcatgaaccaggtgagttgaaaatcaggctgggggccagatatcttgaaattaaagttcaagaatcatatgggtgtgaagtcagggaaactgaggcaagggagttacaggccagggttcacaaagaatctagagaactagaagtatggggtgtcagagatcacataggagttgggagtcgggaatcccacgagatggacgttatgggggagcaggggctttccaagtcaggaggaggtcgaggggcaggccgaggctggggatgagggggttctggggctccctacctgtacgaagttgctctcaaagatggggaagtcccgaaactggtcgaattcgccgctctggaggtagcgttggagccgtctgggacggcccgtgggagaggctgcaaccaggaggcattttaccaggacgaagtctgggggtcgatcctgggaggctgtgcctggcttcccaactgagagggcccggcacagccccgcggagaggacggggtatcagatgcccccgaattgccggccccatcctacttggttccttcaccaggtccaacccctctaggcctggctcccctctctcacctgccatcccacctggttccacctcgccagctccacccagggccggcttagggccgcgatcccgcctcattgcaatgtccccgtccgacgggagcggacggaggagcagagggagaaagcgagggggcgggactacgcgcactgtgacgtcatgatgcggagcgggctttatgacgtcacacaagagcgggctcctgatttgtgatgacgtccctggagggggcggctcctggagatcaggccaaaggggcggccccatcctgctgacgtcaggccccaggtgcggacgggtgccagtgcgcaggtgccggggcccagcgcaggcgcacgggcgtcaggatgcggcctgttcctcccggcgtgctccgcggctcttggctcacagccgtcccttcgctggtgggaagaagccgagatggcggcagccagcgctggggcaacccggctgctcctgctcttgctgatggcggtagcagcgcccagtcgagcccggggcagcggctgccgggccgggactggtgcgcgaggggtgagtgctctttagctgtgcatagcgggcgcggtctacggatgtcgcaggtcttgggtctttaggtgagttacagacggaaggaggctgcgcagggctgagagggaagaggtgggagatccctggaaagccaggcctcagtcacgcacgcgcaggaggggcctcgccagtgcaccgggttgcaaggactgggtgggaggacaagcgcacctgtcggaaggctctggctcgggaatatgtatgagggggcggggctgggggtgtggaatcttggagaatccgacgtccgggcggttgaaatgaaagaggcaaggtgaagccgggcgcggtggctcatctgtcatcccaacgcttagggaggccgaggcgggaggattgctctaggccaggagttcaagaccagcctgggcaacatagcgagccctgtctctacaaaaaatactaaaaaaaaaaaaaaaattaggccggtcgcggtggctcatgcttgtaatcccagcacttcgggaagccgaggcgggcggaccacttgaagtcaggagttcaagaccagcctgctcaaaatggtgaaaccccgtctctactaaaaacacaaaaattagctggatgtggtggcaggtgcctgtaattccaactactcgggaggctgaggcaggagaatcgcttgaacccaggaggcagaggttgcagggagctgagatcacgctactgcactccagcctgggcgactgagcgagaccctgtctcagaaaaagaaaataaggcgtgggagggggctcttgaggaagtggagatgagttttgtctcctaaatatgcgtgagtatgcaagtttggaggttggagaaaaggaaagcatgaatcttgaatgtgcttaatagggactgaactcaggctgcatcttggctattgggctgtcaggtgataaggaggccatttgaatattagcatgaaaaagaaggcttgggagagggagagtgtcatttaactcatgagtatttgtggcgcaaggcttggaagtgaccttgggatagttgctttggcaatgaggttaggcatgtttgtagggtctggttttctgggggtgagggagtgcagagtatgaatattcatgaaatgggtggtttctagtgaaataaaggcaagcagcagtgattaacttgaagataaggctcctccctcagcccaccagtctgtctgtcctgggttctgtgggtgactactatgctgagggcttgggtggtcctcacctggggccttctgtgtcctctgcaggctggggcggaaggtcgagagggcgaggcctgtggcacggtggggctgctgctggagcactcatttgagatcggtgagtcaggcaacgtcctctcctagacacttaacattggtgccctgagaagtcaagacttggagtctgggtgcctcccgtcgtatgacatttactaacaaccatttactaacagatttgcctcaggttaggggaaagtgggacatgaaagaagagaaacactctttaaatgcccccttgcctgtgagacaaacctcagtttttaaaaggtcatcacagcagtaataatttcagagcggctttcctgatcagtcgccacgtgcccagcattagcggttccacgctttgcaagtattaactcagatgtcctcacagcagccatgtgaggtggtaggtattcgtgtcagcccctttttccagaagaggaaacgggctcagagtaggcaccacacaaggtctcatcgtgagtgagtggcagagcaggggccagcttcaaacccaaacttaaattgccatgatgcaggtgtccaggttcccagagctggacgtcagtgctgcccagagtgtagtaatcgagtctgaggccccgaacctgagggcacaaaccctgaagctggtgcccctctgcaaaccctggcatctgctcagtgaacagctcccctgattctgacatggccaggtagttgggaattcctgaactccacagcctccgtattttgcagttggggaagctgaggctcagagaggttgtgtggctatccctgggtcacctggtgaggcagaggcaggatttgggagctgtggggttcatgcatctgctacgggttgccttgtgaggtggaacatggtggaggtgtccccactttgcagatagcaaaatgggggcccagatggggagggaacctggtcactcgggtggaggccaggccaaaatttgaagctggacctcctggcccctgcctgggttgaagggtgggcgggggagggggcgtctctgaacctgagctcctcacagatgacagtgccaacttccggaagcggggctcactgctctggaaccagcaggatggtaccttgtccctgtcacagcggcagctcagcgaggaggagcggggccgactccgggtgaggtggggccctcagggctgggtgtggatggggatggagggtttccagctgtctcttcagccaccccctgctggtccccagcagccttccctccaggcccaggtgggctcccagcaccacctgccactctcagcctctgtcctcaatgactgcccctggaggaacggcattgcagttcgtcttagcgccgccaggcatggtgtcctgcatcacggcctcttcctgcactgctccctctgctggcagacccccttcccctgcaggttcacacagtcggctcctcttcttttccagatcagctgagctgtttcatgaccacttagatgagatttgtttgtgaggagaaagcctcaaaatagctatggttggacaggagctcacttctgtcgccctgtgttgtggcagcctcaagggcccagctcaatcctccgcaggggtcatgcagagaggccccagggctccaggcagcaggatagagagggagaaagaggggcagaaggagcagcagcatttagagaaagcttgcaaaagctggcacaacccacttccacccatcagccagatgtagctgtgagggaggctggggagtgcaggcttgattctggtggccacgcggtgaggtctgcctgagcacccttcctgcatggtacccacatgattctcttgtcacagctgtccccaaacagaatttattatgcatgtaactggtacgtccaggcatagggtggacgccaggtgcagctggatccaggcacagggaaggcgtcctcaggacccactccatcgctgggctgggctttgccctccttgtggtggcttttcccctaggtggggcggtcccagctgctcctggcctcacccaccagccgggccaccccaacaggaagagtcctgggtcgactcaggttggctggcctggggagtgtgggccgtgaggtgggtggggctggagaggggccttcgcggaggcctggtgggcatcacagcctgtccagggctgacaccatccttctgaccagcaccctcttctcccatccccaggatgtggcagccctgaatggcctgtaccgggtccggatcccaaggcgacccggggccctggatggcctggaagctggtggctatgtctcctcctttgtccctgcggtgagttggtgtcggggatgagcccccttctccctcgtcctcctcatcccctaccctggtcctgcttccaccattcgaacccctgtgtttctggagcccgcagaggcctgggagactcagacctggccttgccttccgaggcctcctggtctggaggggtcggtccaggtagcgggtgctttcatggggatagcattgtgaggactcccgggtggggggcggttgaacttgggcctgagggtaacagggagccatgggaaggttttgaaaaatgctccgggggtcctgtggtgggggccgggggaggttagggtggagcccaggcagcaggctccccacctccactgaccccactccccccacagtgctccctggtggagtcgcacctgtcggaccagctgaccctgcacgtggatgtggccggcaacgtggtgggcgtgtcggtggtgacgcaccccgggggctgccggggccatgaggtggaggacgtggacctggagctgttcaacacctcggtgcagctgcagccgcccaccacagccccagggtgagcctctgctgccttcgcggcgctcttgccacctgccccggcccttcctggcggcctcagggtctccaggtccctggactccgggcctcacccttctcctcctctccccttgccccagccctgagacggcggccttcattgagcgcctggagatggaacaggcccagaaggccaagaacccccaggagcagaagtccttcttcgccaaatacgtgagtggggctcccccgcctcccctattcccttcctgacagtcccggtgcctggccaggccctccatgctcccacccagactcccctatggtgctcgggcctgctccttgtcctccgggcctcctgtgtgtcctggtacctgggctgaggcttgtttgcaggaagagggtatggaagtgtggtcaggggaggtcgggccagctctagggcgcagggtcctgggggaggtctcggcctgagctaggttggagccatgaggctggagaggaagggaacagtggaggtttcaaaggaaccagggaggcttggaaaggaggggcgagcaggttcttcagggggttgtacaggaaggagagaggagtgggtccgggagggatgtggcccagggaggggcattgggggcagcagggtgcctgggaggcctcctggagctgaggagggaggggcctgtgctgccagcagcaggtctgagtcccgggggcttagaggctgaggcgtggggtggggaggctggggacagccggaggaggtggcttccacccaggcctctggtccattgagtgtggagactggtgttaggttgtggcacaggagcccaggcaggccaaggccagcgaagaggtctgtgtggcccgaggcaggctaggaggatgctgaggctgggatggctgagccctgctgtgctgagtgccctgcctgagggcctcacccgctccgcctggatagtccaacagttgtgctgcagggaactgaggcccagaggctgagcccttgcctgctgggccctgccctgctgcccactcgagcgccctcccactccctgctggccctcaggccccacggcagcccactggccctgacctgcgctccctccctccccagtggcacatcatcctggggggggccgtgttgctcacagccctgcgtcctgctgcgccagggcccgcgccaccgccacaggaggcctgagtgaggaccgagacccctgcccctccctgcgccccactggccctccctgacctgtagtgacgtaggggacctgggcgccctccccttacgcgacctcccctcatgccggtccccaccgtgggtgggtgatgcccacactcacctccttcccctctctctctctttctgtgtctgtctgtccatccttccgtccggctgcagtggatgtacatcattcccgtcgtcctgttcctcatgatgtcaggagcgccagacaccgggggccagggtgggggtgggggtgggggtggtggtgggggtagtggccggtgagggcccaggctggtcagcgtcccgtcttgcacacccaggggcctccctttctgctggagtcccctgtgtcctcagccatcccaagaagggtttgctggtccctcctttccccccgtcccacgaggccacctgggccagccccttgtcctctgccttctgctggcagaggagcagctggactggggcctttggcacagcagccggtgtctcctgcgcccgcctcccccatggccccatgcagccccaggggcttcccccctgcccatggagtagagcccgagatcctggccactatgccagttctgacctcgcatccccctaccccgagcccatgcagtctgggaacatgccgccttctctccagcctctgtgcctttgttccaggtggtctcaccctcctgtccctggctgggctaggtggtcctgtccaggctcctgcagcgcccccctcactttgacactggactaggatgcagcctcccttctgtgtccccttgagggtaccctgggtcccctcatcaggggcagaggcatgaaagagtcggggctggatggccgggggcttctgggcccgacgcctagtgcagcccctggggtcgtggtttgacatttgtctgcctggtgcaaacaaggaatccttgcctttaaggtgacaggccctccacaggcttccagacttgaaggaaaaggtttaagaaagaaaacaaaaccaacagttagtggagtcaaagcccagacactgtaaatagaaccccctccaccaccccccgccgcccagcatcctacctggactgcggtgctacgagggcctgcgggcctttgctgtgtgccaccctccctgtaagtctatttaaaaacatcgacgatacattgaaatgtgtgaacgttttgaaaagctacagcttccagcagccaaaagcaactgttgttttggcaagacggtcctgatgtacaagcttgattgaaattcactgctcacttgatacgttattcagaaacccaaggaatggctgtccccatcctcatgtggctgtgtggagctcagctgtgttgtgtggcagtttattaaactgtcccccagatcgacacgcagctagcctcctgcattgtatggttataaatagcaccctagtgagtgctgtcgtccagtctctcttgggtgtggtttgaatgatctcgggatgcatgactaaaatggaattacgatggcagatcggaaacgcgtttataaacaagtgatggtttgtgagtcgactgtcaagaccaggaggtggtgcaccgtgggaggttgccttccctcccatcacttctttttgtttttgagtcagggtcttgctctgttacccaagctggagtgcagtggcggtaccttgactcactgcgacctccacctctcaggctcagcgattctcccacctcagcctcctgagtagctggaattgtaggcgtgcaccaccacgcgcagctagtttttgtattttttgtagagacggggtttcaccatattgcccaggctggtcgtgaactgctggactcgagtgatccacctgcctcggcttcccaaagtgctgggattacaggcgtgagccaccgcgcctggcctatttttggtaactttaataaagaagatagtcttagcattgctaacttctgtttctttctccacctgcaggagatagcttatgctttttctgtcttcattccatgtgaatcctgcttcattcttttcctagaggattccagaaatatttactaatgctttttttttttttttttttttttttttgaggcagagtctcgctctgtcatccaggctggagtacaatggcacgatctcagctcactgcaacctccgcttcctgagtttaagcgattctcctgcatcagcctcccaaatagcggggattgcaggcgcccgccaacacacctggctaatttttgtattgttagtagagacagggtttcaccatgttggccaggctagtcttgaactcctgacctcaggtgatctacctgcctcagcttcccaaagtgctgggattacaggcatgagccactgcgccaggcctactgatgctttttgggaagtgttcccaacttggagtcctggtccctgtgtctgatctgcagatgtcttctaccccggcactgggggaacatcttatttttcctgggttaaacattgggatctttataaacctgattatgtcctttccctctaagtctcggttgctttcaggctggcagggttactctgttgggtattccaggaaatgcctgagctccttcaggctcccctagcgttctgttcttattaaacttttcttccccgtctggccggtccttggggaacccactcactattttattttattgaccgggttatccagggatgaagtatgaaactcaaaagatagagtaggttggccaggcatagtgattcatgcttgtagtcccagctgtttgggaggctgagacaggaggatcgcttgagccccagagttcgatgcttcctgagctgtgattgaatcactttactccagcctgggtgacagagtgagaccctgtctccagaatagacaaaagatgcagtggaatccacgtccagaaactgtatgctcactctgggctccagcacccacttcccctccctggaggcagcctgagttttctgtcccctggtatgctgcagatactctccacagaaacaagcagatgcacatgtcaacagttttgcaagtgttgctcttttcccccaccttcttttgacatagctggggcagtttccatctctggtataaggtgccatcttattccatctctggtgtaagagtgtgttgctggatttgagtagttctaagcagcactgcaggagtccccctgttctgctgcatcattttgcacacatatgtgtctgtggaagacatggcccggtggggccccaccttgctgggggagagggatgtgtgtgtgatggtggtgcatgcttcccccttgctactccaggtgtctgccccatcccttcaccctggaggttccagacagcccctcttcaccagcgattccccaactcatctccagctcagatcccacccctgatctccagactcatggccccagctgcctcctgggctccttccccaggatgtgcctcaggggccactaaaggagccagtgcctcccacctgcccggatcgggtgctcctccagggatctttgttccagtgagtggtgccatcacctgcccaacctcatggaccagagcactgccctgtcccaatcacgttctcctatgcaccaccatacctacccctaaagttcttcctggcctcatcccgtcacctctgtctccatggccttggtcccagctcaagcctcgtcctctgccacctggaccatcggcccagcctcctctttggcctcccagcccccaacatccccccctcagtccatccccctaatggagagcttcctgacactagagctgacctcactactcccctgctcacagccctccgcgtggcctctcacctcccccaggatagagtcccaacccatccttctgtgtctcctcctctctgtgtccactgtcctgaccctaactcaatcctcattctctgcctcctggaccctcatcctagcctcgtgacttctggtctaagatgtgagagcacctggcaaggtaaatgctccaggaggggttgctccctcccatttcctgccaccagaaaatgttatcggctgcgtggcattgcgaaagccttcctcttcccagcctagggtttcatgtgggcatttaggtgctcccagtacatagttgcatggcaaacaatcctaaaatatacaagactacatttagtattttgtaaaattctttactaaccccaaattgtctactggaaactataggctcctttttttttggtgggtggggggcaggtgtgtttgtgggatggagtttcacttgtcacccaggctggagtgcagtggctcaattttggctcaatgcaacctccacctcccaggttcaagcaattctcttgcctcagcctcctgagtagctgggattacaaccgtgtgccaccacacccagccaatttttgtatttttagtagagaccgggtttcaccatgttggccaggctggtcttgaactcctgacctcaagcgatccaccttagtctcctaaagtgctgggattacatgtgtgagccaccgcccctggcctctgtaggcttctttaacccatcagagagactccctggtaaggattaggggctaattactggtgcctcttcagctgtcagtccatcctcctttatttgtacccaccttccagtcagcaaggcacaacaatgttgttacaaaggaaacaaactcaatttggcccatttcctggaaatgcaatctcccaaacaggtttgtgtgaaccaaattccattttcctttgtttcccatgtgcagtcccagttgcatttccatgggagccaatccacccacccatagaatgacttgaaaatgtgtgaagttcagaagtttcataccaagaagtttgctgagcatgatgtttgtatattgattaggagtaaaaatgttcatttttacaaaatattacaacttctccctctcccctccttccacccagtatcccctgttcctcccccaggcattctggtcactgttcctttttgttgagatcattctcggtgtctcatatagctgggttgcagctccgttctttgccaggaggtggtaatagaggattccacgcactcagaatgcctcaggccggcgcctgtggcttctctcaatggagggaagtgtcctgcagggggcgctgttggtccttcaggcaaggtcgggttccctcgaagtctctgtcttagcagttgctggtcttcagaaacattgggcaccaattttctcatttctgaaatggaattcaggtgaggtcccctcagtgctgaggtgcttcatgttgtcagaggaagagttgggaagggagcggaatggagcagaaaggcgtcatccgctgctcactgagctcagataggaggccagggatcggcagattcaggagcccactcctggccaaccccaggggccccacccagtcctgtccctgctccttacgtgctgtgtatctttaggcaagttgcttcctgtctctgagcgtcgtctttgtttccgccttcctgggcctacggcaggcctgattcctccaggcagtgtccagagttccggacagatggaaaaggaagagagaatgggtgtcacaaaggtctgtccactcctgggcctcaggcttgggggccctgctcagggctagcctgtttgggcctcggtatggactcctgcctcctggtcaggacctggaaacctgggagcaggcaaggcaggaacaggagagggaggcaaaggcccaccaggcagggatgcaggggccacctggagacggaggagacggggctcccgggagggaggccagtgggagtgagagcttgaaggagagagagccaggagaggagacaggtccagagaggagggaaaggaaaggacagggcagagacagagaaaccagagagagggaaggaagagagacccaagggggagagacagggaaggaagagggaggtgagaagaggaagaggcagattcagaggagagaggagagaaaagaggtggaaatcaaacaggagaaagagggaggagaggagggaggagagagtgtaggaaaaaagcaggaggaaagagccgggcacggtggctcacgcctgtaatcccagcactttgggaggccaaggcaggcagatcacgaggtgaggagatcgagaccgtcctggctaacacggtgaaaccctgtctctactaaaaatacaaaaaaaaaattagcagggcatggtggcaggcgcctgtagtcccagctactcgggaggctgaggcaggagaatggcgtgaaccctggaggcggagcttgcagtgagccgagattgcgccactgcactccagcctgggcgacagagcgagactccgtctcaaaaaaaaaaaaaaaaaaaaaaagaaaagatggccagagcaggaggggagagaggaagagggagaaagaaggaaacagtgtagggggtcagaagtggaaagagaagaaaaaacagaagaggaaagaaagacgagggggtgaaaaaagggacaggaaggaagagagggagagggtgggtgccatggctggtgagctcggagaagagggaagcagagaaacgggtgaaggagggagcgtcctagggagaagtgggtgggggagagggtgttgggggagaagagggtgggggagagggggccccgggagagggagggatggaggagcggggagctccagccagagaagaggaaagagaaaggagagagctaggaactgggaaggaaaagagctaggaggagaccatgagacagaaagagaagagggtgaagagagaggatagtggctgggaggagagaggaggagggaggagcacagagggagaggagaggaaacagccagagaatctgctagaagggagagaggagagagaagagccggacagggagagcagaagtgagaaaaaggagggtggccacagagaggacagcgagaaaaagagaacaggaagaggggaaaagagaagaaatgggagagggaagaagggtgggagagaaaacggaacagagagggggcacagacagcggactggaccgagagggagatggagcggtgcggagggggagagagaaagagggagggaaggagggtaggagagggctggagataggggaaaagagaaaaggagggtaggagagggctggagagagaagggaagttaagaagggaaggagagagacagacattagggaagaaggaaaggagaaaggaaaaaatacaaaaaagggcagagagaaaagaacaggccgggcatggtgcctcgcacctgtggtcccagcactttgagaggctaaggcaggaggatcactggagcctgggaggtggaggctgcactactgcactccagcgggtgagtgagcgagaaaaaaagcagaaaggaaagaagaggtgcatgagtgtggaagagcaatatggagagaaagaagggagagaggattggaagtagcgacagaggaccatgcccctccagctgaggagggggcgcccctaagacagcgtcagcccagagaccggggcaggaagcaggaacgtgaagcaggttaggagccagtgtgaggcacggagagggccgggtagctgggcggcgggggtgtcgtgggcacagcccaggctactgcggggacaggctgccagacccggcgggtccaggttgggaactcggccatgcagcagaaacgttccctgcctcaacagggcgcagccaccccggggccatctctgtgacccagggagagaaaggacaacgaatgggactagacgaggatggggaggaacagagcagctgtggaaggtgcggcagagaagggcccaggagaaaggaggaagggaaggagctggaggggcgggagaacaggagacagaacaggacagagacagctgcccgggaggatgggagaacagaaagagggaggaaacgccgagcactgacctgggggaggggagtaaagagaagtgaagggggattggaagggaactggagaatgagagaagcaacaggcggggtgcgtgtaggagggcgggagagccaatgacaagacagaaaaggcagagaaagcaaagcaagaccagactcctcatccggtaacactgtgtcaggtcattgccctcccaccccgcccccaaccccataactgaaaacaagtaggaacctggataaaatagtcttaacaattttttttttgagacggagtcttgctgtgttgcccaagctagagtgcagtggcgcgatctcggctcactgcaaactccgcctcccgggtttaagcgattctcctgcctcagcctcccaagtagctgggattacaggggcccgccatcgtgcctgctaatttttgtattttttagtagagacggggtttcaccattttggctaggctggtctcgaattcctgacctcatgatccgcccaccttggcctcccaaagtgctgggattacaggcgttgagccaccgtggccggcccttaaaagcatcaaactacatacaagaccgtaaggaagctgtgggtcaacgcggagggacgtgggaacccatcccggtgaagcggcagcgtcacgtcctttctcccagggatctgttggtcggagacatctggactttcatgtggacagcctgagtgacagggggacccaggggcctcacctgggctacctggggtgggtggaccctccactgtgccaaggtgcagcctgggctcggaggaacatgccctccgcctagtccctgacatccttttcacatccaacacgcagagcaggggcgtgagggagcaggcaagcagggaagggaaagacaatgagcaagagccagcgggacggtggggcggatggcagaggcttcgctgctggaaaatcagacgcagagtacgaaacgcctgtgctcactatgttaataataataataaaaggcaaaaaaccaggctcattgatacactgatattaacaagaacaaagtactgagagagagagagagaggtgaggaggaaggcagaagagggaaggctggctttcctgccgtccactttgtgacctcctgcgtgatggcgcgtccttccaagtcatggggtaacgtccttgtggcccagataatgagctgcagacggacgggaatgtgcaactgtggagacacgcgagcttatggtcccaggacctggcaggacatgaaatgagtttcttaaagggtgaaacagattgcaggaccaatcgtcccgatcgtccaaggcaggataaaaatatcccagcatgcggaggagccctccctgcccagtctcctccgaggggcctcggggcctctgcagctgcagctgttggagtcatcaagaagacggggacgcgggagggggacagggaccaggaggcgaggggatggcgggagtcgggggtggggttgggcggggtggggagaaggctgtcagcgccaggctcagacgagccggtgggagcagagacgaggagagggaagggtcaaggacaatgactggcagaggaactggaaaggaaggagcgggcatggagaggcggagctgggaaggacttgggggactagaggcgaggggagagagcttgtggggtgagggagaaaacggagaggaaagagcgagtgaaggtgaggatggaaaggaaacaggaaagccccatggaggggaggatgggagaaatagagtgtgtcagagacagagagggagagagagatggcgagagatggagagagaaagagacagcgagagagacagagacgttgagagaaacagagatagcgagaaagagtgagagaaagagacagggagacagcaagagagacagtgagagagacagtaagagggagaccgagagagagagtgagagacagacagcgagagagagacagtaaaagagagatagccagagagagacagacaatgagacagaaagcgagagacagagagagacagtgagagaaacagacaaaatgatggcgagagagtgagaaagaaagagacagcgagagaaacagagacaatgatggcaagagagtgagagagacagagcgagagagacagagacggactgagaaaatgagacagagacagcgagagatgggagagacagggagagagagagagagagagagagagagagagagagagagagaagcgccaaagagaagccaccaggagcgtgtggaggggaagccaggtggaactcactgaaggtgcagggagaggaaggggaggcaggagtgagaggaaagaggagaggcaaatccaagggacagaaactggaggcaaaggaggcagaggagggagggagaccaagggcacaggccctaaccacagtgctgccccttgtccccggcccccttgtctccttctgacacagtcggttgctgtggacgggcacagtgagactggggccccatcagcgcctcctctgggggttgggtacagacgatgaggaaatgacagggcggggatgaggaggaggacctagcgcaggggaaggagagggcagaagacagtggggggtggcagtctggaggacaagggagaagattccagaaaggctgagagccacaaggtggacaatcaggaaaaggtggggctgggtggaagcgtgtggaggactggaatatcgcccaagggaggagcagtgtgtgcaagacctagagaggaggaaacactgaggatccagccgaagagaggacacacagggacagggacagcctgtgtgtgtgtgtgttatggatagggggaggaggaggggggagaggaaagaggaggaggagaaggaagaaggaggaagaggaaagaggaggaagggggaggaggaggaaagggggaggaggggtgaggaggaggaggaaagaggaggaggaaagaggaaggaggaggagggaggaagaagaggaaagagggagaggaggaggaaagggggaggaggggtgaggaggaggagggaggaggaagaggaaagagggaaaggaggaggaaggaggagggagtaagaggaaggaggaagaaggagaaggaaagatgaggaaggaggaaagaggaggaggtggagtaagagggaggaggaggttgcggtgagctgagatcgctccattgcactccagcctgggcgacagagcgagtccccatctcaaaaaaaaaaaaaaaaaaaaaaaaagggaatttgggggcatgcagagacaggaacagagtgggagcaggggttgggggagagattcagagaatgggagagaggagagggcgagagagacagaggaagggggtcacagaggagaggtagaaggagaatggggaggggcaaatcctctttcccgcccgagcctcagtttcctcatctgctccctcaggtggtgaggagtccagggaccacccgccaagtgtctgcagggcaggaaggcctgcggaggggagagggaggtggaggaaggaggctcaggcttgaatccagtgtggtgactggcagcagaagcgtcccctccatgggcacgggctgcctctcaggctcagattctagagtgttccttcctagagtccctccaggcctccttcagcctcccccaccccaccctgacctgggagggagtagccattgtcgtccacatatttttccaagggagaaatcaggctgcagcccacatcctccttcctcctcctctttcctgcagccccgcacggtgtagctggccaccccttctagggctgtggcggctgaggggaaaggaaggggctaaagagagtcgccttggtacacagttggcgctcaattggtgcccttcccctttcctaggggagagcacagagagtaggaaggcagagagaggaagagaaagggggaatcgagggtgagaaggggaggctgtatctataaaaagcctggcacacagtcggtgctcaataactgcccaggcccttcaggaccacatgaaaagggagaagaagaaagtcccgcagagcaaaagcagaaggagaggcagcctaaagagagggacatagagccaggcacggtggctcacgcctgtaatcccagcactttgggaggcctaggcaggtggattgcctgagctcaggagttcgagaccagcttgggcaacacggtgaaaccccgtctctactaaaatacaaaaaattagccgagcatgttggtgggtgcctgtaatcccagctactcaggaggctgagacaggagaatcgcttgaacccgggaggcagaggttgcagtgagctcagattgcccccctgcactccagcctgggcgacagagcaagactccatctcaaaaaaaaaaaaaaaaaaagagagagaggcacgggtggaaagtgtgaagcagaccagtaggtgtttgttaagtgttatttcttttccccaagagacaggagaaagtaaaggaggagtgaggagaggaggaagaggaggaagagaaggaggaagaggaggaggaaggagaagaggaggaagagaggaggaggaggaggaggaggaggaaactccagcagagagaatagaagagactgttgtgtgggaaggagacaatatatgtaaagtgactaatacacagtgggtgcctaataaatgcccattctcctccctggcagcaagcacagagaaagcagccaggaggaagggagcaagcggagagaaggagaaaaggagagaagggagaacagagcctgtgaggcaagcagacagtgtagatgaagcggcagcatacagtaggcactcaatacatgcctatttcctccctcaggaaagagctggcagggcagagaggagggggagaagctggtggagagaaggaggcagggagaagagaggaaatgagaacaagtacactggtgaggtggtgggcacacaggaggcactcaataaatgcacattgtcgtccttggaggagcaagagaacaagacagaaatgaaggcacagacaggaatgagaggaaaaggttggcccaggaggcctccgtgggggtggaggagcagagggaggagggatcagtgagaggagtgtggcagaggagaggatacgcagggagggggcattgcaggtaaaccatggggcacacaggaggcactcaataaacacctgtacccttccccagaaaaggacccagagaacagcaaggggataagctggcagagcaagaggggcagcgagaaagaggtaggagatgaggagggatgttaattgcctggcatacagtaggtgccccataattgcttgtctttgtccccgagaaagagccgatgggacagaaagaagttagagataagggaagaaggcgaagtgaagggttaggggagaataagaaaactgtctggcacacaataggtactcaataaatgcccattttcttccctggcacagagcagaaagaagcagagactggtggagtcagtggagactgaagggcaagaggagaggagagaaaggacataattgcttgcataccagaagtgctcaataaatgtagtccttgccttggaagagggcagagagctcagaaacacaaggaaaggacagaagagggaccggggaggaagagagtgaggagagaggtatgtaaggtgtttagtacacagtaagtgctcaaaatgtgtccactccctctgccaggagagagcagaaagtcagaaaggagaggacaccaatagagaggaaagaaaggggccaggcgccgtggctcatgtctgtaatcctagcactttgagaggcagaggtgggaggatcgcttgagcccaagagttcgagaccagcctggccaacgtagagagaccctgtctctacaaaaaatacaaaaattaggctgggtgcggtggctcattcctgtaattccagcactttgggagccaaggtgggtggatcacctgaggtcaggagttgaagaccagcctgaccaacatggtgaaaccccgtctctactaaaaatacttaaaaattatccaggcgtggtggcgggtgcctgtaatcccagctactcgggaggctgaggcaggagaatcgcttgaacccaggaggtggaggttgcaatgagctgagatcacgccattgcactccagcctgggcggcaagagcaaaactccatctcaaataataataataatacaaaaattagccaggaatggtggtgtgtggagttccagctacttgggaggctggggtgggaggactgcttgagcccaggaagtcgaggctgcagtgagctgcgattgtgtgcgctccaacctgagcgacggagtgagaccctgtcctagaaagaaaaaaagaaagaaaggaatgggggtggggggaggaaagaaggtagcgagagaggagccatgttcctcaactcctcggcgcatagcagatgctcagtagatgcccgtttccttcccaggagagaccaagcaaatcagaaagagaaaggaactggggcagaagggacaggaaagcaagaaggatggaaagtgcagacgcggttaggggaattgcctgccaagcatcaggtgcttaataattgcccgtttcttccatggaaggagccagaggcacaggaggaacaagtagagggcgccgaggacggcacacccgaggcgggcacacccgaggcgggcacacccgaggacggcacacccgtggcgggagacggagtgtgtgaggagaggcgaggaggcattttgggtgcatacagcaggtactccataaatgcctgtccccttccccaggcagagcagagaaagcaggctgggagtaggtggagaccccaggaagggaggccaggggagaaggagagtctgagggtggaggccgtgggccaggcccgcaggaggtgcaccttccccaacccagcagccgctgtggccgaccctcctccgtggcccagcccacaggcctccccagctggctggctcctccggagccctgacaagggcccattgtcctgggcctggcaccgcctggcctggcctggcctggagggggaggggaggctgtccagccctgaccggctcttgtcccctgtgtctgtttgtgtgtattggagtgggggcgctgtctggtctgtctgtctctgagtctctctgtgtctccctgtctctcacgtgctgtgtctctgtgacctgctgtctctctcatttctgagcttacggcccccatcttgtctctgtctcgctctgtctctctctgtctctttccgtgcctgtctctggttctctctctgcatccatctctgtctctgggagggaggagcccccacccccagctccagaattcccaccccctatacccaggatcagggctggggggccgagctgagaggcagaggagtgaggaaggaaagaaggaggcgcagaagggagagaggtgaggacagaaacagctttattcagcagggaccgcagaggccccggagggcttcgtccagggagctggggagagaggaggagtcagagacaggagagacagacagagatggagagaaatggggggagagacagagacagaaatgggggtagagacagagacagagagaaatggtgggagagaggcagagagaagtgggggacagtcagagatagaaatggggaagagacagagatagaagtgggggagaggcagagacagagagaagtagaggagagacagagatagaagtgggggagagacagagagaagtgggggagagacagagacagagaaatgggggagagacagagatagaggaagtggaggagagacagagagaagtgggggagagacagagacagagagaaatggagagacagagatagaagtgggggagacagagacagagaagtgggggagagacagagagaagtgggggagagacagagatagtgggggagacagagacagagaagtgggggagagagagatagaaatgggggagagacagaagtgggagagagacagagatagaaatggggagagacagagacagagagaagtgggggagagacagagatagaaatgggggagagagacagagagaagtgggggacagacagaggcagagaagtgggggagagtcagaaatagaaatgggggagagacagatagaaatggggagagacagagagaagtggggagagacagagagagaaatgggggagagacagagatagaagtgggggagaaacagagacagagagaagtgggggagagagagacagagaagtgggggagagtcagagatagaagtgggggagagacagagaagtgggggagaggcagagaaagaagtggaggagaggcagagacagaagatggggagagacagagatagaagaagacagagagaaagagacacagagatacaaagccagggagagacagagagatggggagaaaagggagagtaagaaagagaaacagggggtgctgagggagactgagagaaagttggggggaggagacagagacacagaaaagaggtgggaggaagagacagatgagacagatggagagacagagagaaacagacgagaaggaggagagagagatggagagaacgatagggagaatgagagacagagacagtgaggagagggagatgaggcaggagaggagataaagagaactggggagagggacacagagaaagacagatggggagagagacagagacagggagaaagagaaggagagagagacggagagagagaggagagagggagacagcgggaaagagggggagagagagagacggagagagggagacggagagagagagacagagggagagagaaagagggagagagagagtgggagagagagacagagggagagagggagagggagagagaaagagggagagagagagagagggagagagagacagagggagagacggagaaagagagggagagagagacggagagagagagacagggagagagagacagagggagacagggagagagagacacagggagagagagagagagggagagagagagacggagagggagagacggagagagagacagagggagagagagacagagagagggagagagaaggagagagagagagagagggagacagagacagagagagacagagggagagagggagaaagagagagagggagagagagagacggagagagacagagggagagagggagagagagagacggagagagagagacggagagagggagagagagagacggagagagagacagagggagacggagagagagagacggagagagggagagagagacggagagagagacagagggagacggagagagagacagggagagagagagacggagagagagagacagagggagagagggagacagagggagagacagggagagagagagacagagggagagagagagacaggaagagagagacagagggagagagggagacagagggagagacagggagagagagagacagagggagagagagagacagagggagagagagacagggagagagagacagagagagagagggagacagagacggagagagagacagagggagagagggagaaagagagggagagagagacggagagagagagacagagggagacagagagagagacagagggagagagagagagagggagagagagacagagggagagacggagaaagagagggagagagagacggagagagagagacagggagagagagacagggagagagagacagagggagacagggagagagagacacagggagagagagacagagggagagagagagacggagagagagagacggagagagagacagagggagagagagacagagagagggagagagaaggagagagagagagagggagagagagacggagagagacagagggagagagggagagagagagacggagagagagagacggagagagggagagagagagacggagagagagagacagagggagacggagagagagacggagagagagagatggagagagagagacagagggagagacagggagagagagagacagagggagagagggtgacagagggagagggagacagagggagagagagacagagagagagagagggagacagagacggagagagagacagagggagagagggagaaagagagagagagatggagagagagagacagagggagacggagagagagacagagggagagagagagacggagagagagacagggagagagagagacagagggagagagggagacagagggagagagagacagggagagagggagacggagagagagagggagagagagacggagggagacagcgagagaagacgcgcggagccttgcggcaggaggtcgaggaaagaacagcccctctcacctggcgtcggtggcagctgaaccctgggcccgactgtgcgatttaaggggtgccctgggggtgagaccgcccccccacccaactgccttatctggccagacccggctctgtgagctaaatcgggcagcagctgtcaccaccagggggtgtgggacagctgtccccctccccccgcacctgccctgcgcctgcctcttgaccacagcccctccctctccctttctgcagcctgggggtgtggagaggccactggcatctgtgcggggcgccccagccccctcagctctgggacaggcctggccgggtgccctggggcaagcggtagccctctgagtcctgaggcgctcccctgggaagagcagtcccagcgggtgggggcacaggcgctctgcactgtgaggggcagacagtaagtgcttagttgatgcaatgacctggtctgtcctgcccgctctcacctgccagaatatgggggttggggcaggagggagtgggagcaggaggaggtcagctggcccctctccccccacccccagcgcccccagctcctcctcccggggctcctcactccggaccttatttggccatagcccaggacgcacctgggggccacagccccgcctgccactcaggcccaagaatagcaacactcaggcccccgccagtctgtctgggacctgcgatgggacaggcgacaggcacagggtggcagggaggggcccaggggcactgagagaaggggagagacacagacagaggggagagacagcgagctgaggagagactgagagagaccgtgggagagacagagagacagggtcaaagagacagagaggggtggagagaaatgcccagcaagagagatagagaagggaggctgagacaggcgaagcgagagagggagacacagagacagagggggttagccaggggcccggggccagacacccagatggggcagagagcgagacccacaccagcagaggcgtggggagcccggtgggcgggcaggaggtgcagggatctggatgggatggggccagagccgttcgggagtctgcaacccccagcagtttcccctccggtgctgtctggcttttaactttacgacctgccctttgaccttgggaaaacttgcaaaccagaacctgccacaccctggtccatgcgcagccagggctttcatgagtgtgtcctgcggggcatcagctccaccttgccaggggtgcatgggcagcttgtgggctgcctggatgaactgcctgcctgggcgcatgggcctgtggctccaggaggggacacaccccaagccagggaccccttgcctccctgtgcctgagtcccccacttctgcaggtgcctaacggggatccccaggttcatccaggcccctggacaccttccactcattcctgcctcctcacctcccagggcccaccagcctcagaccctcctctctgtcgccctcaggggcctagctcaagccctgcctcgcccctcccagcctcctcccgggcctcctggcttctggttccccctccattctgtgcctgcagccccagaggggtctctgcacccagagctgacctgtccttcccttctcgcagctcccaggctgcccttggaggtcccgcctggttgggttcctggccgggacccaccctcctccttcatcacctcctcaaataactctggcgataaacagccgtggcgttccaggtctcatccgggatgacttccaattctggagtgccctcccgtgccccgccagcctctgcagagccctcctcagccttccgtggccagccttgtctctgggccattttatgcgacttgcttgtcccggggtcccttctctgttctctcgtccctgcagtgctctgtgggaaccccataaaagcccccactgctgggacagaaactcttggtgtccccttgggtctccccacagggtgggagctgggagggtgggccgacacttcccgtcagcacaggcgtccctcctccgctgtggggaccctcgtgatgacccggggcccaccgggggatccaggacactctccctgtcccagtcccactcgcaacctcactctcccttggccaagtaacacaacatattcacaggctccagggattaggacaaggcatcttttaactgtatttattttaattaatttttttttttgaaatggagtttcactcttgttgctgaggctggagttcaatggcgcgatctcagttcactgcaacctccgcctcctgggttcaagcgattctcctgtctcagcctcccaggtagctgggattacaggtacctgccaccatgcctggctaattttttttttttttgagacggtgtctcactctgtcacccagactggagtgcagttggtgcgatctcggctcactgcaacctccgccttgcaggttcaagcaattctcctgcctcagtctcctgagtagctgggattacaggcatgtgccaccacacctggctaatttttgtaattttagtagagatggggttttcaccatgttggccaggatggtctcaatctctttaccttgtgatccacccacctcagcctcccaaagtgctaggattataagcgtgagccactgcacctggcctaattttttgtttgtttgtttgagatggagcctcactctgtcacccaggctggagtgcagtggcacgatctccactcactgcaagctccgccttctggattcacgccattctgcgtcagcctccccagtagctgagactacaggcgcctgccaccatgcctggctaatttttttgtatttttagtagagacggggtttcaccgtgttagccaggatggtctcagtcttctgacctcatgatccgcccgcctcggcctcccaaagtgctgagattacaggcgtgagccaccgtgcctggtctattatatttatttttatttatttttttgagacagggtctcactctgtcacccagggtggagtgcagtgattcgatcatgggtcactacagcctcgacctcctgagctcaagtgatcctcctgcttttgcctcccaaagtgctagggttacaggtgtgagccaccatgcctgggctattatattttgagacaaagtctctcttactcacgatcatggctaactgcagccttaacctcctgggctcaagcagtccttctgcctcagcttcccaagtagctgtgattacaggcgcaggccaccacgtcccacttatttatttatttatgagacagagtcttcctctgttgccaaagctggagtgcagtggtgcaatctcggctcaccaaaacctccacctcctgggttcaagtgattctcctgcttcagcctcccgagcagctggaattacaggcgtgcaccaccacacctggctaatttttgtaattttagtagagatggggttttcaccatgttggccaggctggtctcgatccctttacctcgtgatccacccacctcggcctcccaaagtactgggattataggcgtgagccacggcacctggcctattattattattattattatttttgagacggagtttcactctgtcacctaggctggagtgcagtggcacgatcttggttcactgcaagctctgccttctggattcacgccattctcctgcctcagcctccccagtagctgaaactacaggtgcccaccaccacgcccagcgaatttttttgtatttttagtagagacggggtttcaccatgttagccaggatggtctcaatctcctgacctcgcgatctgcccgccttggcctcccaaagtgctgggattacaggcgtgagccaccgtgcctggtctattatatttatttttatttatttttttgagacagggtctcactctgtcacccagggtggagtgcagtgattcgatcatggcttactacagcctcgacctcctggcctcaagtgatcctcctgcctccaccccccaagtagctgggatcacaggtgtgcaccaccatgcttagcttattttaaaattttttgtagagacggggtctcactatgttgcccaggctggtttcaaactcctgagctcaagtgatactcctgcttttgcctcccaaagtgctagggttacaggtgtaagccaccatgcctgggctattatatttttgagacaagatctctcttactcacgatcatggctaactgcagccttaacctcctgggctcaagcaatcctcctgcctcagcttcccaagtagctgcgattataggtgctggccaccatgtcccgcttatttatttatgagacagagtcttcctctgttgccgaggctgaagtgcagtggtgcgatcttggctcaccaaaacctccatctcctgggttcaagcgattctcctgcctcagcctcctgagtagctgggattacaggcacccgccactacaaccagctaatttttgtatttttagtggagatggggtttcaccatgttggccaggctggtcttgaactctttttttttttttttttgagacagagtctcgctctgttgcccaggctggagtgcagtggcacaatgttggctcactgcaagctctgcctcccggattcatgccattctcctgcctcagcctcccaagtagctgggactacaggtgcccgccaccatgcctggctaatttttttgtatttttagtagagacggggtttcaccgtgttagccaggatggtctcgatctcctgacctcgtgatctgcctgcctcagcctcccaaagtgttgggattacagccatgagccaccgcgcctggccagtcttgaactcttgacctcgggtgatctacccgcctcggccttccagagtgctgagattacaggcgtgagccaccagcctcacatgccacttattttaattttttttttttttagagacagggtcttgctatgttgcccaggctggtctcatacttgtggacctcagcctcccaaagcactgtgattacaggcatgaggcaccacatctggccagggtgtggacatctttggggccactgttctgcccgcctgccaatcaacggaatagaatcgagagtcaagaagtaaactcaggcatggtggctcacacctataatcccagcactttgggaagcagaggcaggcagattgcttgaggtcaggagttcaagaccagcctgggcaacaaagcgagatcccatctctacaaaaaaatttaaagaaagtagtcaggtatggtggcatgcacccgtggtcccagctacttgggaggctgaggtgggagggtcgcttgagcccaggagttcaaggctacagtgagctgtgattgacccactgcactccagcctgggtgacagagtgagacccctgtctcaatcaatcaatcaaataaagaagtaaacacctgctttctccttagcaatgacccccgtggaacccaggagatcaaactcatttgtttgccactggtctctctccagcaccggaggagcgtgagccccagggggcacggacttgtgtttttttctgctgtgtcactgatgaggaaactgaggcccagcagtgagaaactggcatgaggtggcagagaaccaggaggcctcctgggctctcggccccacacaccagggtgtctggcctgtaaggtaagtgggagtcactgagtggaaggggccccagaagggtggggccgtcagacacaggccaggcaggcagcaaatcagcagatttattgaggcagcagcggcagtggggagcaggggtgtggggagggggcggggcctccccagggtccatgaagtgctggcctttcccaggcatgcagtgtgcgcagccggagggggatgcgcagggactgcgctgtgggcgccgatggtcagccatggtcagtctgtccgcagccagctgcccttctcctccacctccttggtcactaccagcagcacctcgcacaggccctgggccagcgcagccgccaggaaggccctgggtgggagaaatggggagactgaggctcggccagcctgggcattccgtctggggagtggggtttcaggcccctggtcttggaatcgcctctgtggggctcacctgactccgtcctcatcccccagggcctcgggcgcccgcagcttggagtccaggttgtagtagacaccgtccacctggcgcagggccacccagtgccgccggcgcagcggcagtgacagcagccccagcgacacgggcgagggcaggttcaggatcagccccagtacctggggcagggccagctgggacaggggcctgtgtgggcagggaggggacactgccatcagggcctgctccgcccgccggtgaaatgttgctgaacatgtggggcccaggctggtggtggtgagggcctcctgagcccacccagaggtgttccttaatcagccaccctggttcccgacactcatccgttcacctgcccactcaaacctcccacccatgcggccacccaaccagacctcccacccacccacccaccgtccacccacccacccaccgtccacccaactcacatcggcccttcaccaaccaccatcaccctgtctgtccagccacccacccaccaacttaccaactcctcacacagccacccaggatccatgcatgatccgcccaccccactgagcctcccagccaccagccaacttcccaatgacgattcacacactcacctcccatctatgcattcacttccatccctcatatacacccgccccacctccccgtcaaccacccaaccaccatcaccatccaactagccatctactgttcaccacccaccacccacccacccacccacacagccggccaccacccagccagccattcacccaacagtggactcgccatgcccccaatcctcactcactcttgacccccctgccattggtctacccctcatccaccagccacatgcccagccactggccagccggccatcaaaacttcccattcatccacccaactccccagcctcctgtctgctgcccattgcccaggaacacccatcacttcactccccctgacccaacacatccaacggcctactcagcattcacccagtaaccatcatccacccagcatctcagcccatcgaccacctgatctccccctttcaacccatcagtgccaggcttcccacattcatgccaacctcccccagccacattcccctccctgccccccaacaggctcacactatagggtgccctctgtgcccggcccagcacatgctgtgctgctctggggcctacctcctcctgtcccaccacacggcggccaggcccagcccctgcagagcggccatgatcacattgacatcatagttgccggtgcccaggaggctgcgatgagggttcagccgggagtctggggccaacctggtagtgggggtggccagagctgaggtggggacccctggaaaggcctccccacaaaatgggggtcccaggggccacaagttgcctcagcctttgactctccccgcttcagaccccacaactcatccacccccaagtcctgcctctcctgccccaattctgccctgtccccaagtcctgtctctcctgccctgactctgccctgtccccaagtcctgcctctcctgccccgactctgccctgtccccaagtcctgcctctcctgccccaactctgccctgtccccaagtcctgtctctcctgccctgactctgccctgtccccaagtcctgtctctcctgccctgactctgccctgtccccaaggccccagatgggctctgtcttctcccgcagcctccagcctccctccagtccattcccacacggccctggccctctcctgctctcagctctcccatggctccccaatgccttggacaaagtccctgtccctccgccagtcccttcctctgtccttcaaggcccacctcagatgtcacgtcctctgagaggagcctcctgacctccaggctggatcggggccctgtctgggctcccccagtgaactgagccacctcaacgatgacagctgcccgcatcaccctgatttaacactgcttgcttctcccacggggttgccctcacccctcccctgctcacagcccactctgctgcctcatttcccccaggacagagtcccacaaggccctgcgtggtctggctctggtggcctcacctcagagcctcagcaccctccttcctggtcccctgtccccagccacatccccggtgcccaccgcctcccgccccacccccgccaacctttcctccagctcttcccctgcctaggaaggctcttccgcctgtcaccacttgtctctgggccctgcctctgaacagctgcacctctgttccctatctggaccctgggcaggcaggacatgggaggaaaacgctcgtgtgtgtgtgtgtgtgtgtgtgtgtgtgtgtgtgtgtgtgtttccctcaccacccttaggctggcacttgtgtctgagtcatctcagggtctccagcatggcttttgtatgaaagagctgatgggtccttgttgcgaatgatagaggagatgactaaataccataataatcagtctgaggggctgggactcttaagatgtccgagagccggaggaggcttggagcaagaggcaggggaggcagggccatctccaggtgtagaaagactctctaggatcaagtggggactgaaggcagggacagactggaggccatgggcaggctgggcaggagagggtcaggcctgagctggggccagggacatggggacagagaggagggagtgagagatggtaaaggagtgattttttttttttttttttttgagacagtcttgctctgttgcccggctcactgaaacctctgtctcccagcttcaagcaattctcccaccttagcctccagagtagctgggactacagacatgtgccaccacgcccagctaattttattttttatttatttttattttttagtagagacggggtttcgccctgttggccaggctggtctggaattcctgacctcaagtgatccacccgcctcagcctcccaaagtgttgggattacaggtgtgagccactgcgcccggccaaagagtgatgttggacattgtgaatagtgaagaggaacattccatgctggcagagaaggaagccatgccgggcagaaagaagtacctggaagcccagaggccgcacagaagggctcacgggagtggagagtctggtttgaggggggccgtgagggctgaagatgcggaggcaggctcggcctccgctatgaggagggccctgagtagggcgggggcgtgtttaggatggactggagagctgtgacagggcccagataagagatgcctgaagctgggtgagcctgtaatcccagctactggggaggctgaggtgggaggatcacttaagctcaggagttcaagaccagccagaccttgtctctaaagaaagaaccactgggccgggtgcagtggctcacgcctgtaatcctagcactttgggaggccgaggcgggtggatcacgaggtcaggagattgagaccatcccggctaacatggtgaaaccccgtctctactaaaaatacaaaaaattagccgggcgtggtggcgggtgcctgtagtcccagctactcgggaggctgaggcaggagaatggcatgaacccgggaggccgagctcgcagtgagcgagatcgcgcaactgcactccagcctgggcaacagagtgagactcagtctcaaaaaaaaaaaaaaaagaaagaaccactggattgaggtctggctggggctgaggccacagggacagacaggcacaggaggcaacatctccccagagtcccagcgtctagcttaggcaagtgagcgcggagcagaagaaagcccccaaggctcagcgcctgcctggcggcgagacccaggtgggtcactccgccagagctctgctgctccaggggctggggtgggtgacggtcacctcttgcagatctcatcggcagcctcctggctaaagagctgctgctgcagaacgttgttgagggcgtggacagcacacagctccaggcgctgccgttcgtggtacacggtgggtgggctcggctgtgctcccggggcctgggacatgccgtcctcggctcctgctgggggttgggagggggagaaggtcctcaggggcccgggatctagaggtccagcctcccagcaggcctttggggcatcgccattgattgagctgggactcggagcagcccaggaagacactgggcccctgaccccgctccctggcagtctcctggcagcacacgtccctccatcccttattcctattcctacgaaaaacgctgtctcttctgctcccctagcaacagaaaaccaccctcaccaggtctctaagtaaaagggtccctatcatggtcacctagcaacagaggaacctgcctccccgtccctaggtaaccagggcgctctgtggttacctagcaacaaagccccctccccaccgcactaggtaacaaagtctgtcctccgagcacctagcaatagagaatcctcctcccctgtctctaggtgatagggtcccctctggtctcctagcaacagaagactccccttccccggtcatgtagcagcgaggctctctgctcttgtcacctggcaacggggccccctccccagtcactaagcaacaggagttcctcttcctatcacccagcaaccaggccccctccccggacaccaaggaatggagcccttcgccgacccgcaccccagccacggcgctcgccctttgcctggcaacgcccctcaccccgcctgcctctccgctccaccgagccaggggtttccgcatccccttcctgggcggcggctctgggctccgagtgcggggcgggcaacaccgcgctgactgggcaggcgggacggactacagctcccggtgatccccgcgcgccggactacgactcccgtggggccccgcgggactcctgctccacacggaacgcccgggccgcgtggccctgaagtcggccgtcgggcctaggaaatgccgcactacaacttccgtcgggctccgcggcaggtcccggaagtgcgcctcagaggcccttctttcgcatacggccgcgcccactactgctcagagattctaggaaacttagtaggtaggctctcgcgatagcttcctggcgccgcgctctcatgggtgctcgcccccggcgatggcgtcatgcgcggtgcgcagacgcagcgtgacgtcacacaagggaaagggatcagagacgccaggcggtgcggggggaggcagcggtgatctttactgagtcagaagggagaccctggggaagtggggcagggcaggggtgggatggtggtggtgagaggccaggcagatgatcttgtctcgggagggaggaggcttctcagcagagatggatccccggcctggaggggagctggcagcaggctgcggggagaggggaatgagcgaatgagacagaggagagatgaggagacagacgcctgggggaggcagtggtgggaggaggggacagggcaggggggcggtggaggaagacccggagagagcgggacagagccctgggggtggacagagacagagagagtctcgatcagaggcgggcacaaatggagacatctacagtgccaggattcaaagtcatggagagaggttaaggaaataaaggtcagaaagaaagaaaggtcaacaaatacagaaccagaactgcagaactagtgagagcccgggacccccaagctctgcagaacacaggagcccagggccgggggagaggggcctggccgcacccaggaggctctgccagaaggccgtgacggtggcggagccggtgaccgcgcctggctcggcagggttctctctgcgggtgtgcacagcaaagcttcggcccgtggggccccggggtccgctcagctctacatccaccacgtgcatgtccgtgaggctgggacaagaggggcagtcagtctggagagcctggactcagcccaacaccctgcttagctctgctcacctggtatcagccacgagcaccccaatcaccccatcgaagcccaggctgggggcagccagggcagccgccgccatggtgttggaatttcgcggggcaaaggggcagagcccacggacagggccttcgtagagcacagtgcaaggcccagggctgtgggctgcagccaggggtccctcaagccggaagccatcggggtgtgtggccatggtgacacgaaggctctggaagcaagagcccgggttagggggagtggggtctttgcaggcctcccctggttcctggggagcccagcaggcctcacccggaggcccccagctgcatccaatctcctgatgtcctcagcgccccacagggcccctcgggccacaaacacggcgtggtcccagtgctgtgaggcctccaagagctgccgctctgtggtctggtcacttagagctgagggggaccccacctggggtggatgaaggaggggagggttgaggtcagggaaggatatccacttcagggtggggtgagaccaagacagaaggggcagggctctgcgtaaatggttggggtggggcttaccaggagattggcatggcgcaggatttgtgccccagattcatggattattttgggatgggccacttccacaaccagatcagggcgcctgggagaggggaaagagggcggagggtcttggagaggtattaggcctcttctccccaaggttccctccgagtctactgagggctgcccttcttctccctgacctgggaggcgaaatgagatgaatgggttcgtcctgtttcacatttgcttgaaccaaggcccagagagggtcagggaacccctgagatcacacagtggctaagagagccaggacaggagcttcagggagctccactctcccatggcaaggtcactgacctttccccaagggcagcaaggttctggagctgcagggaagggggcacgctccctgccattcgtcctgggtcacgattccagacaaaaacaagttctaggccaagttctggtccctgagccaagaggcgggagacgagggactgtcctggggagagggaaaggagagggctagagatccagagagagggggacagagacccagagagagaggaggtggggacagagacccagagagagaggaggtggggacagactcagattgcggggtagggagacagagatgggggcagggcagagacacagtggggtggacagaggcccagagagaagggagacagagacggagaggacagagacctggggtgggggtgcagtgggcagacccagagacacagccaggggcagatagagagagaaaaaagtgtttgtggagggcagagagtcttgggagctttaggaaggggtttggggaaggaggccaaggatggtcagggactcaccgaggcggccatagcccaccacgcccaccctccacgggcccctgtcggccatggccctgagtgcggtgtctggggcctggctccctgggctgctcgctgcccgctgcacaaggcctgggcagccgctgctctttggacatctgacccttgagcctctgggctcagtcttcccccttccccgcaggcccagcgtgggggcgtgggcctgcgggagtggaggcgggagaacccttccctgtgctctgtccactttcccgggtccagcacagtgagcatggtgaccgggggttctgggaaccctgcgtgcccccctttcccctgcagcacaccctctttctccctgctgatgtggaaagtttcctctgcagtcccctgccccctctctggccggccaggttgtcatggaaactgcatcttgctttgggttgggagaagagatggtgacagggactctgggctctgtctgtcccctcgtgctcacctctcctccttgtcctcaggcggctaaggtctgagggaggcttcagcctggccgtggccctagccctcccagaggcagcgggagccctggttgtggcttctcctcaatgtgcccttgcctcagcgggtccaacctccctagccccgctgcgcagcacgggtccccttcccacagcctccgcccctgtccacagcctccctccgctctgatcatccttcagttcaccttgacttgctacctttcactctgtcccccatcgtgccaccagctgcctccagtgtgacgttctcgctcccacgtccgtccctcccgttccccagctcgcgtcagcccaggagaagccttcgaggcctggagaggccaagtgcccccaacatgagccccagcctctgtgccttgagggtgcctggcatcggaaatggcgcaggctgcggcagcgcaggctccctgcccccagccaccacctggtacccgctgcagtgtttccatggcaaccaggattggcgctggaaggaggctggagagaaagagagcgtgaacgggagcatggggtggggggggcgggcactgggtggcgagagccccaagttgacgggaggagagaggagacagacgcgggcagacagagaggggccaagaccccgacgtggcacccaaaggctgccgctgctgataagggaggaattggcttccagagccaggagcccccggtgtgggagagatgagatgcctgggtgtagacagagccaggaagggggcaggggccaggcacctcacggaagtggggggcctcccgccatctctaccttctgactcctgctggggcctgagtgtccccatagtgcccatagctgccgtgtacggggtacagcctgggccactacgaggggagaagggggctgggcgcaggcctgtgtgtcctcagggctgtgtccccgaagccacctcagcgtgggaaagcactggaaggccctgcatggctccgtccctccctctgcctcccccagcagcgtgagatggcagccctggccagccccagccctccagggcctgcaactcgggcaccttgaccccccaagagacatcaccaccccctcccccaacccacccaacagctgcccactgtgccagcaaccccccagccaggcccgctcagggtttgctccctgccctcccagggctctgctcctgcccttctgagtggcactgtggtgcccctgccgccccaggcccacccgatccggccctccagcctcccactgaaccggccagaaatacagctgctgtgccccagaggccgcaggcccagcctcccgcttggcctccctccccttcggcaccccgtcctctggagcagccttgagggggtctgcagtggagagacacactctggattgggccctgttgtgggttgaattgtcacccagaaagggaagcgcagaagtcctgacctccagggcctcagaatgggaccttatttgggaattgggtttttgccaaggatggagctgaggttatactggaggtggaggctcctggtccagtctgacctctgtccttgtaagaggggaggttaggcaggctgcagtggcccacacctatagtcccgacactttgggaggctgaggcaggtggatcacttgaggtcagaagttcgagaccagcctggccaacatggtgaaaccccgtctctactaaaaatacaaaaattagctgggtgtggtggtagtcgcgtgtaatcctagctactcagggggctgagggaggagattcgcttgaacctgggaggcagaggcttcagtgagctgaaattgtgccactgcactccagcctggacaacagagcaagactctgtctcaaaaacaaagaaacaaacaaagaaaacggtcaggcgcggtggctcatgcctgtaatccgagcactttgagaggctgaggtgagtggatcacctgaggttaggagttcgaaaccagcctggccaatgtggtgaaaccccatctctactaaaaatacaaaaattagccaggcctggtggcgcatgcctgtgatcccagttacttgggaggctgaggcaggagaatcacttgaagctgggaagcagaggttgcagtgagctgagatcacaccattgcactccagcctgggcgacaagaataaaactccatctcaattaaaaaataaataaataaaagagggggagttggacacagacggacgcacacagagggaagagatgagaggctacaggggcaggcactggaagactggggtgatgtgatacagccaccagccaggacagcctggggacaccagaagctggcgaggcaggaagctcccctgaggtatccccaggtttcagagagagcgtggccctccctccagcctccagaactgtgggacgatagatttcctttgttataagtctccacctgggtttgggtgtggtgtggcggtgctgggggaggagtttaggaagaaagggaatcagaccttctctggggtctccagggtgaaggctgaggggcctaagaccacccggaggtgccccgtgcccaccctcccgacggagctgcgaggctggctctccagcctctccttccgcccccacccacattcactttgttttctctcctccgtgctttcatgaccaaaaaaaatatttttttactttttccatgttttttttttaaagtaattacagagcaggtagtcgttgacgcaaacctcccttcagtatcaaaagtgtctgtggggcaggtggggctggggcgggtggaggctcccccccgcgccgacgacagggaccgccggccgggagcagagccgggcgctgggacgggagctctggcgacgtgtccatctcttcagttttgagggcggaggagtgggagggagggacgggcgtcaaactgcaaaaactgaaccgtaaaaggaaggtgtttggggccgaggggaaaggacacccctggagaaagctcctctctcccctggaaggcggcgggcccggaacgcttggtgggagagcgaggaggaaacgcggagaactcaggccacttctcctgggtcccacgtcccctcccgtcaccggggattggcgggggtgaggcgaggatcccagagactccgctcctggagccccaccctgtccttactgggggtccgagccccagatggggctggaagccacctctccccaattccctgcgtggtcccagaaggtgggctgggctgtgggagggaggggtcccggtcaggctgcgcccgggctgggacctgggtggggggctccacgcccctcgcccgcccggccccgccgcctcagatctgcgtctcttgcacgttctccttggagccgctcttgaagagcagaggttcgtggatggagttgaggccaggcgggcctttgcccccgcagcccccgccgctggggttgctgctgtagtgcgccttgaaggcggcagccacgtagtggtggtggttgaggtggtctcgctccagggcgggcagggccaggtggctgtccccgcccacaccacccccactggccacggcggccgcggcggccacggacacggccgaggcggcgggcagctcgtcctccacgttgatgatctccacggtgcgcgtgggcccgtggtgcttgtggagctggtgctgcttgcgcagcttgtagaaggccacgagcatcaccgcggccatgaacgtgatggccacgaagcagccgatgatgattttggtggtcttcatgacgtcgtccaggtccttgagggcgttctccgtcacatccgtgatgggcaccgtgaacgccttctccgtgggccgcgaggagcgcggggcgggtgccgtggtagaagacgaggcagggccggccgcgtccccaggccggcccccaccccagacaccgtctgtcgtgggccctggcggttccttctccgtcccccgcggctgcagggcctcctctccgggctgcgtctccagggtctccacggtcaccgtggtgaagtaggtgtagccgccactgccccctccaacaccaccactgcccccagggccgcccccgccgctgccggtgcccccggccgccacggggtccacggccgagacgttgagcgtggccgaggcggtggtgttgccggctgagttcgtcaccatgcacgtgtactggcccgtgtcctgcacggtgacgttggtgaagttaagcgtgccgtcatgcaggacggagatgcgcacgcggtaggagccgtgggtcatgagggtgccgttgggcgtcagccagttgacggaggtcatggaggtgcccgtgcggcatttgagctcggcagccatgccctcggtgacgttgaggtccgtgggcggctccacgatgacgggcgcatagcaggtgaaatgcgactggtccagctccccaatgtagcgccccttgaggccggcgggcgcatgacagcgggcgcagcacgtcgtgttgctgggcaccgtctccttgagccaccagctcagccagagcacgtcgcagttgcaatgccaggggttgtggttgaggtgcacgcgctcgaggcggtgcaggggcgtgaagaggtcgtggggcagcgacatcaggttgttgtgggacaggttgagctcctccagcgacttgaggtcgtcgaaggcgttgcgctcgatggtggctacctgggcgtgcatgagccacagcttgcgcaggctggtgagaccctggaaggagcccgggcggatcaggtccagccggttgcccgacagctccagctcctccaggcgcaccagggccgtcaggttggggatgtccttgaggttgcacatgcccaggttgaggtagcgcaggttgaccagcccctcgaaggccgcctccgagatgtattccagccgcttgagctcgcccaggtccaggcgccgcagcgagggcacgcggttgaaggcgtaggaggggatgctctcgatggggttgttccgcagccagagctcccgcagcttggacaggtactcgaaggcctgcgtgggcaccgtggtcagccggttgtcaaaaagctccagcgtgttgaggctgggcagcccgttgaaggcgcccacctcgatcttgcgcaccaggttcttgctcagctgcagaatctccaggtgccgcaggtgcttgaacgtgtccgtccggatcacctggggagagggagacacggatcagtcacggagatactgacggggaccgtggggggatcaccaaggtcccgggcgcaggtggggccgtgtggctggatctcccgtgctgtgctgtgacggtacgacctatattgcaacatggtttgatgagtttcttataaagttaaaactggagtcaaggctgggtgtggtggctcacgcctgtaatctcagcactttgggaggccgaggcaggtggatcacttgaggtcaggagtttgagaccagcctggacaacatggtgaaaccctgtctctactaaaaatacaaaaattagccaggtgtggtggtgcgtgtaatcccagctactcgggaggctgaggcacgagaatcacttgaacccaggaggcggagtctgcagtgagtcgagatagtgccactgcactcctgcctgggcaacagagcaagactccatgtagaaacaaacaaaaaaactggattcaagaattttgggggaccaagcacaggggtggctcatgcctgtaatcccagcactttgggaggctgaggtgggcagatcacttgaacccaggagatcaagatcagactgggcatcagaacatagaccccatctctacaaaaataaaataaaataaaataaattagccaggcgtggtggcatgtgcctgttgtcccagctactagggaggctgaggtgggaggattgcgtgagcctggaaagtgaaggctgcagtgagccctgatcacgccactgcactccagcctgggcaatgaagtaataccctgtcaaaaaaaaaaaaaaaaaaaaaaaaaaaaaaaaaaaaaaaaaaaagaagaaaagaaaagaaaaatgaacaaacaagaaaatgaaaaaaagagaaaaaaagatagttacttagaaagttaaaactggagtcaagaattttggggacggccaggcatggtggctaatgcctgtaatgccagcactttgggaggctgcagtgggtggatcacctgaggtcaggagttcgagaccagcctggccaacatggtgaaaccccgtctctactaaaaatacaaaaattagccaggcgtggtggcacatgcctgtaatcccagctacttgggaggctgaggcagaagaatcacttgaacctgggaggcagaggttgcagtgaactgagattgtgtcaccacactccagcctgggtgacagagtgagactccgtctcgaaaaaaaaaaaaaagaattttgggggccaggcacagtggcttatgcctgtaatcccagcactttgggaggccaaggtgagaggatcacctgagcgcagaagcttgagaccagtctgggcaacattgggagaccctgtctctacaaaaagaatttaaaaagaaatataaaaccaagaattttgggattgaagaggaaaaaacttttgaaaaaaaagttaaaactggagtggccatccgacccggctgttccattcctgggtatttcctcaagagaaatgaaggcagatgtccacgcaacggcttctatgtgggtgttcacagcatttttttctcaggactgcctaagctggagacatcccaaatgttcctcagcaggtgaatggacaaacactgcgaggtgtggccgtgtaaaggatgctgcggctcagccatgaaagggacctggctgctgtgaccccctggatgaatctctcagctcagccatgaaagggacctggctactgatgaccctctggatgaatctctagggggttacactgagcaaaagacgccgaacacaaaggagccggtgcggtggatccgtccacaccatgctctgggtgttctaagtgtgcgtctctgcgtgtgtgggcaggtgaggtatctggggcagacagggaagggcatgagagagctttctggggtgattgaaaggtgctacattggcgtggtggttacatgacggaaagcgactgttaggactccccaaactacacttaaaatgaggatattttattccatgccagtgatacattattttattttattttatttttgagacagagtcttgctctgtcacccaggctggagtgcagttgcacaatctcggctcactgtaacctccgccttccaggttctagcgattctcctgcctcagtctcccaagtagctgggattacagggtcgtgccaccacgcctggctaatttttgtatttttagtagagatggggtttcaccatgttggccaggctggtcttgaactcctgacctcgtgatccacccgcctcagcctcccaaagtgctgggattacaggcgtgagccaccgtgcccagccaattttgtatttttagtagagacggggtttccccatgttggccagactgttcttgaactcccaatctgaagtgatctgcctgccttggcctcccaaagtgctgggaaattacaggcgtgaaccaccgtgcccggccactatacatagttttaaaaatgaaaaaaataaggctgggcatggtggctcacagcagtaatcccagcactttgggaggccgaggtgggaggatcacttgagctcgggaattgaagacaatcctggtcaacaaagcaagacccctgtctctacagacaaatacgaaaattagccctgtgtgatggcatgcacctgtggtcccagctactcagaaggctaagatgggaggatcgcctgagcccaggaggccaaggctgcagtgaactgtgatcgtgccactgagctccagcctgcgtgacagagggagatcccgtccccaaaataaataaataaatatacaaaatgaaaatagtaataccagcaactaagacacattgaacacatctttggtgccagacactgttctaaacattttgtgggtaataactcttttaatcctccaaactgccctgtgagatgggcactattaccagtccttattcgatacctgcaattccaaaattcttaaggccctaacaatcagatttttccaaactttgacaccaaatcccacttggtggcaaaacccgatcagaactcatgtgaagctattttatttattatttatttatttatttatttatttatttattttgagatggagtctcgctctgtcgcccagcctggagtgcagaggcgtgatctcggctcactgcaacctctgcctgccgggttcaagtgattctcctgcctcagcctcacaagtagctgggattacaggcacgcatcaacacgcttggctaattttttgtatttttagtagagacagggttttgccatgttggccaggctggtctcgaactcctggcctcaggtgatccacccgccttggccttccaaagtgctgggattaccggcgtgagccacctcacccagccacatgaaagtaaagcttttattgatcccactcgtgactatccaaacatttcattctagaaattcccatgtttcaagaccactaagatattataaaacctatactatctattactatgtttctaatatcggaatgtcaaaacgcatcagacctcaagagtttcacacgaaggatgatgaattaggcccagggaggtgcagtgacttgcccaaggtcacacagaagtggacagcagagttgggactggatccaggccctctggttccagagtcctggctcttgacctctgaccctggctgccgcctctcagggctggagctggggtccacgggaggggcagtgctgggtcagagcacgggaggcaggagctcacagggtcctcactactgatgaccacgccgggtgcactgaggcccagaaggccacacagccattggatcatatctgcaaagcccagatagtggtgtgtgccagggagaaggggacggacactgggggaatgcggtgttacagtattaacggaggaaactgagaacctcagatgcatcctgtgtcatcacaaagaagctgaagaattaggtatcagagtatatgcaccaaaagaaaaaagagaaaaagaggccgggcgtggtggctcacacctgtaatcccagcacttaggtaggccgaggcgggcagatcagttgaggttgggagtttgagaccagcctggccaacatgataaaactccgtctctgctaaaaatacaaaaattagccgggggtggtggggggtgcctgtaatcccagttactcgggagactgaggcaagagggaggcggaggttgcagtgagccgagatcgcgccactgcactctggcctgggcaacacagtgagactccatcttaaaaacaaaaaagaggccgggcatggtggctcatgcctgtaatcctagcactctgagaggccaaggcaggtggatcacctgggtcaggatttcgagaccagcttggccaacatggcgaaaccccatctctactaaaaatacaaaaaattagtcaggcatggtggcaggtgcctgtaatcccagctacttgggaggctgaggcaggagaatctcttgaacccgggaggcggaggttgcagtgagccaagatcgcccagttgcactccagcctgggtgacagagtgagactctgtctaaaaaaaaaaaaaaactggaaggacatactccaagcttttcttagtagtgaactttatctgttgggaattatggacaatttttattcttgtgtgatattttttcctcaatgaggaaaaattacttttacagtaagcaggaataaaaacaaaaccaaacccagatatacctgagaggcaaacagcgtaagaaatggtagaatctgtggcataggcagaatcataaaataataataatgtatgtcggtgctgtccaatagaaatagaatgtgaacacgtgtgtaatgtttgtttggttgttttgttttaagacagagtcttgctgtgtcacccaggctggagtgcagtggcgcagtctcggctcactgcagccttgaccgtctgggctcaagtgatctgctcgcctcagcctcctgagtagctgggactacaggcacgtgccagcacacctggctaattttattttattttaattttttgtagagatggggtctccctatgttgcccaggctggtctcaaactcctggcctcaagcgatcctcccgtctcagcctcccaaagtgctgggattataggtgtgagccaccacacccagcccacatgtgtaattttaaatttcctagaagccacattgaaataataataaagaaaaaaccaaacaggtgaaatcaactttactaatatatttatttagctcaacaggtccaaaatactctcatttgaacctgtcatcagatgcaaacttgcgattgagccattttacactctttatggtggagcttcgaaatccaaggaaacccaacatgtgttttacacccagggcgtccagggcacctctcagtagcaacgcatgcagtccccgagcccagccagcagccccgatgctggcggctgccctgtgagatgctgcgggtttactcggtgcccagggacgctctgtggacacagtcaccttttgtccatccagcagccctaagaacaaggactgtgatcgccccgttttagaaaggaggaaacaggagcctaaagaagtggcttgctccatggcagagctgggcagggctggccggagcctgcgcccctccccgtctcgctcggccacctcacacccacccatcgccgttccccgtggacagacacggaaacagaggtcacgggtgtagtgtgaagagcagagccctgttcaaatcccgcctcccccgtcctggttgtagggcctgtcacttgagctctctgtacctctgggctcactcttaccacgaggaggatgatgaaaagcacttcagagggtgagggagaggagatgaggtcccagtgttcaggggtgctcagcacgtcgtcattctcattgttatcgttatcgttggcgttgagaaacttgtaccatgcccttgggattacagccctgagccgtccactgaaaggcggctcttagggccaagaaccgtacttttttttttttttttgagagggagttttgctcttgttgcctaggctggagtgcaatggcgtaatcttggctcactgcaacctccacctcccgggttcaagtgattctcctgcctcagcctcccaagtagctaggattacaggcgtcctccaccacacccggctaatttttgtattttttttttttttttttagtagagacgagggttttatcatgttggccaggctggtcttgaactcctgacctcaggtgatctgcccaactcggcctcccaaagtgccgggattacacacgtgagccaccctccccggcaagaactgtctgactgcatcctttcccgcagaaaatcagggccgcccccatcctggccccctgtcctccgactccctgttccagcctctcctctccatgccaatggccccagctgcacctcagccctctgcctctcccaccaggccctagaaaggtctgtttaggcagggcgcatgcctgtaatcccagctatttgggaggctgaggcggcagaatcgtttgaacccaggaggcgaggttgcggtgagccgagataacgccattgtactccagcctgggtaacaagagagaaactcagtctcaaaaataaaataaaatagaagtctgtttatacccacagatcccctgtccctcccctgggcccttcacaatcctcccaggactgcccgtcagtcccagcataagactctcccatgccccgctgtgctgccaccaaggcgacaatgacagtgagagcccataagacacagtctctgccctggagcagctcatccgcctggcaccaccttctccttcctcctctacttgtttcccccacctcctgttctggcaagtccctgagcccagcagacacactcttgcctctggcctttgcacctttcctgcttttttcctggatacctccctgcatctgtccttcaacacctagttccagggtcacttacacaggaggatgtcctggtcccgtctccccaccccagtctggtcagggatccccggggctgggttccctggagcccagagtccaggtgcctccagggagggcagggactgggtcccaaccacagggcgtcttgcgcaatgaaggactccaccgcctcagagtgaaaaggatagacgaaggataggcgcagtggcttacgcctgtaatcccagcactttgggaggccgaggcaggcagatgacttgaggtcaggagttccagactagcctaggcaataaggtgaaaccgtgtttctaaaattaaaaaaattgttaaaaagtaatatatactcatttaggaaaaaatgtatgagaagaaaataaaaattggccaaaatacatctacccagagctaatttatgttaatcatttggcacatccttccaattttttctatgcatattatgcagggatatattttttcattatcttttactttttttttttttttgagatagagtctcactctgttgcccaggatggagtgcagtggcacaatcttggcttactacaacctctggctcccgggttcatgcaattctcttgcctcagcctcatgagtagctgggattacaggcacacgccactacgcccggctaatttttgtatttttgtattttttttttttttgagacagagtctcgctctgtcacccaggctggagtgcagtggcacaatcccggcttactgcaagctccgcctcctgggttcacgccattctcctgcctcagcctcccgagtagctgggactacaggcacccgccaccactcccagctaattttctgcatttttagtagagatggggtttcactgtgttagccaggacggtctcgatctcctgacctcgtgatctgcccgcctcagcctcccaaagtgctgggattacaggcatgagccaccacgcccggctgttttctttcttttttctttttttttttttttttttagtagagagggggtttcaccatgttggccaggtggtctcgaatttctgacctcaaatgatccacccgcctcagtgtcccaaagtgctgggattacaggcatgagccattcattgtggcttgcttttttacaaaattttgatgatacaatatacttgcctgggtcctgcatttccccttaataacattgtgagtattttcttacatcatgaatagtgcttcaaagacatgatatgaacggccctctagagtactggcccacggctatacctacgtatggacattgatctgtaattgacagggtgatctttccttttctttctcctttctctctgtctctttccctccctccctccctccctctttctctctttcttttctttttttcttttttttttttgagtctcgctctgttgcccaggctggagtgcggtggcacgatctcagctcactgcaagctccgccttctgggttcaaatgattttcctgcctcagcctctggagtagctgggactacaggcacgcaccaccacacccggctaattttttgtatttttagtagagacggggtttcaccgtgttagccaggatggtctcgatctcctgacctcgtgatctgcctgcctcggcctcccaaagtgctgggattacaggcgtgagccaccgtgcctggccctctctctctctctttctttctgacagggtctccctctgtcactctggctgaagtgcagtgctgtgatcataactcactgcagcctcaacctcctgggtcccagtgattctcccacctcagcctcccaagtagctgggactaaaggcacacaccaccatgccttgctaagtttaaaattttgtagagatggggtcttgctgtgttgcccagcctggtctcaaactcctggccttgagcaatcctcttgcctcagcctcccaaagtgccgggattacaggtgtgagtcactatgtctgtgcttgatttcttctttcttttttttagatggaatttcactctgtcgcccaggctggactgcagtggtgcgatctcagctcactgcaacctctgccttctgggtttaagcaattctcctgcctcagcctcccgagaagctgggattacaggtgtgcaccaccacgcccagctaatttttgtatttttagtagagacagcatttcgccatgctagccaggttggtcttgaactcctgacctcaagtgatctactcgccttgccctcccaaagtgctgcgatgacgggcgtgagccactgcgcccggccgatttttttcttaataggcttctgccttgtctaacttcccagagtgaacatggctagctttcagaactgaatgagacctccgtgaatgctatttcacaggcaggagggtgtgaatgtatttgcagggagctggtgggggctcagcctgcaggacacagcctgaggatgggctcgggcaggccttgtggggcagggagaatggcggagtacagcaggaatgcctctgcaggtgcgggtcctgagggtcatttgggtcccaagccggcctggggtctctgcacccagccggagatgcgactgtgcctgggcatgaggctgggggctgtgggcatcgcctgtccagggcaggagaagcaggggcttgagaatgtctctggcctgactgggctagagctctaaaactcccccctctgccaggggacccccccagagcttgcatttcttcctcagagagagtatctggggaagaacccaacctggagcttctcagagccggttctcagagctcatttcccgggacgctaaacaccaacagcaaaaaaacactctctcatatcaatgcgttaggagcctgcacactccctccccgagactccagtgcacctggcgtgttgaagctccgtgaagcccagtgggagacagcggctttgttttgctcaactctagttttcccaaacataatacacatggggcccttctcaccaaacgcagcttatcacctccctgggaaatgctggtgattgataaagcaggcactcggttgctatttctattaataataataacatcaataatagtaacaggaggaggaggtcccggtcatcactgatcgctaggcagagaatgaggtggactttaaaagaaagcctggaccaagaggccggacacggtggctcatgcctgtaatcccagcactttgggaggccgaggcgggtggatcacttgaggtcaggagttcaagactagcctggccaatgtggtgaaaccccgtctctactgaaaacacaaaaattagctgggcgtgatgatgcacgcctgtaatcccagctactcaggagcctgaggcagaattgcatgaacttgggaggaggaggttgcagtgagctgagactgccactgcgctccagcctgggcaacagagtgagaatcgtctcgataataataataataaatacagaaagaacaaaggtattgctggtccatgtgctgtcaagagccccctggaactttccccctctctgggttacactgagatggcctggggcccccttcattcccagcaaacactctgtgccccaccctcccctccctcccttcagggtcccttttctcagtgggccccccctagctcatcctccccgtccaaagcggggctgcggccttgcccgtgggtcgtgggtcggccagcagggccaggtggcttcatgccttttaatgccttgcagcgcactcccccatttcctctccatccccacagcccagccccgcctcatcctctctccctgggcccgccgcagcctcctgcctgggcttcagtctctcccctccagtccatctctggggtcctgctatgccagagctgaccctgcctctgccctcctctagacgcctccggggctccccagtgccctcgggaagttcagcctgtattggaagccctgcctgggcatctgcctttctccccattcccctctgcatggcccctcactcgcagccctcactcggatacacgttagccaggatcagtccttggaccctctcgccgggcactccacctttgcacatgctgttccctctgctcaggacgcccttccctttcatccaccgggaaagctcctgctcaccctcttgaacccagcccaaaggtctccactcattcccccattgcttattgattgaatggagatacagcaggcctgcaggtgcagaggtggagaggggccgttgtctgtgaaaggacctcacaacgtcagccttgcgagctgctctgaaggcttgaggtgagactcactccgctcagggcttggcacctggaggcgtgtgctgggcacaggcgatgatgccttgcagggcacgtgttgctaggctccttttttgttttttttttttgagatggagtttcgctgttttcacccaggctggagggcagtggcgccatcttggctcactgcaacctccgtctcccaggttcaagtgattctcctgcctcagcctcccaagtagctgggactacaggcatgtgccaccatgcacgattaattttttgtatttttagtagaaacctggggggggggggtctctctatgttggtcaggctggtctcgaactcccgacctcaggtgatccacctgccttggcctctcaaagtgctgggattacaggcgtgagccaccgtgcccagcctaggctcacttttcagagaaagaagatggctcagcgaggccacatgaccaggaagtggcacagccagggtttgagccctgggcctcagccccctccatgcccacctcctgcctgcagctcccggagcctctgcggcaccccaggctcctgctgactcccccggcagccctggaggtgagcatcacacgtcatttcagagacaggagaccaaggctcggtgaagtcaagtgactcagcagggctgccggtcccggggagcgtgcacctggggctccagcccacagtgttttccaagtctccttggtgcctctggacagaggaccgtgacaacagcgtggccacaggcggacagcctgaggctgctcggcgctcagcacgcagtgacccagctgcagagggaagggggtgtgaagggagatgaagggacactcccaaagggagggggtggggtccccccgccaatcactttaataatgcagttgagaactgagtggaatgggggtgttgctgcaaagggaagcctggttttgttgaaacatgtggcatagggctgctttaaatagggagtctctttattttgaacagaattccagtctattctgtctcctcttctctgcagaatgcctgctgagcagcctcgtgggggatggttgaggctgggtttgaatcctggctttgctgctgaccagcctgaactccctggtggcctcgggcaagtgtcctcacctctctgagcccactttcctcccaggtagcatggggttactgtgatgcttggacaagacagtgagcgcttgggatgagacaatgaatgtgtgggacatggcgagcatgcagtaatagatattttttcattgttaattcagttgataatgatcattaacactggtcctggccagccacagtggctcacgccagtaatcccagcactttgggaggccaaggcgggaggattgcttgagctcaggagttcgagaccagcctgtccaacatggtgaaacctcgtctctactaaaacaacaacaacacccaccaaaatttaccctggcgtggtggcacactcctgtagtcccagctacttgggaggctgaggcaggagaatcgcttgaacccgggaggcggaggttgcagtgagctgaaattgcaccactgcactccagcctgggtgacagtgagactctgtctcaacaaaaacaaaaacaaaaacaaaaacaaaaaaacaaaacactggtcctgtctctgggcttccagtttctccctcagcatctttcctctacactggctgtcagaatgaccggaaatgcagttcagaccttgccacatccccactcccagcctcccatggctatcaccctcgacaaagtgtcagaggcccttcagaacctgccctgctgccctctccttgactctagccatagtagggagaagagagatgcatggggttccctctgcttgccacactctgtccagcctctctgcctttgcacaggctctgccccttttctatactgtcctcctccttgttctctggaaaattccaattgccttccttggaaaagccctttttgacccctggtccctcatcagtcacacacacacactctcttattagatccctatcgcagtgactataatttggtttcacacgtctgtctccttgtctaggctgtgagttggtgtgagtagagactgtgttggggcgacttctgcattcccagcacgctatgcaaggccaaattcgtgacagacttcggccaaggtctgctgagtaaacagactagagtgtctaaggctcttattggggaacaccctggttgtgctggtccctgtttccctcacgctttttggcctgggtgataatgccaacatgtcaaaatcatgttgacatcaatatgacagaacttgggaacggaaaagcattggtgttctgcttccaacctattctgctttttaccttcgtgtgcacgtctgagatcattaaagctacatcacctttcttgtgtttgtcatcatttttactttcatgatttctgtcctcatgttttaggtatgtctttcgattttaagtcagtctgaaatccttgtcttttaactggaagtttagctcatttacatttactataattactaatatatttgaaattcttcctataatgttattttgtgctttttaattgtcctgatttttatagcttattctttcccctttcctgtcttctttgtattgactgaatttcttatgattccatttcttctctctactgtattagaatttatatattttctcattatttagtggttacccttaaaatttaacatgcatacctaaagaccaaagccagttaattcttctcttctcctcccaaataatacacagaccaaagaccagttaattcttctcttctcctcccaaataatacaaataccaaagaccagttcattcttctcttctcctcccaaataatacaaagaccaaagaccagttcattcttctcttctcctcccaaatgatacaaagaccaaagactagttaattcttctcttctcctcccaaataatgcaaagctgatctcatctctgactctaaaacaaagagacatcctggtcagcttcccaataaggtaaaagggggggaatcataatttgttaactgccgattattgccagagctgtgctaaatgctctgaggtatgatctcatttaatctttgtggaaattctgtcacatgggggttatcaagcacatacccctgctcccttcatatctggtggttcatagctgagaaaatgaaggttcagagaagtaaagtcacttgtccccagtctcacaggctccaaagttgcagaaccaagactcaacgtctccttctcctgagcacagacatgggagtctccaccacacctacccaccctaaactgaaacagttgggctgtctgtgggcttcacaatgctttttgagctgtggggcccattcattcttacattaccatgtattgtttcgctcatttgacaggttattttttgagagctgctatgtgtcaagtgtcatactgggctctggggatccagctgtggacaagacagacaaagccctgtcttcctagatcctggcctcagagaagaagagagacactaaacaaaacaattatgccaacaatcatttaaccagcaaaggtgtacacagatcgtggaggctgccctggttgcagggggaggcaggcctggggcccctccaaggcctgatttgaaacaccctagaccagatcacctctgaagttgtgagtgtcatcaccctcatggccctgacacagagtaggatgggcaaggtggggattggttcttgacgcaggtaaatcctcctgccccctcaccctaacatctttagcctgacgaagatgttgacattttgtcctacagtagaggacctaggcctggggccacctctgacagccacatagctgcccacacttccaagttccctggatcttcagcccccatctgctgagcccacctccacctatgctgggctctgggacagatctcaatgatgcagatgtgaatccggcaaagggacgtggcccccatcaatgactgccttctaaccccgatggggactttccttttatcctgcaacttggcctgtgtagggggactttccactttggttgtggtaggtaaatattactaaagctgaaaaaaatcccactgagatctgttggggtttttaagaaaataaattgtgaagaaattccttattaaaaatgtaactgtggtaagaaaacaattaagtgaactgttcatcttaacattataaattgtatttatttatatttatttatttatttgagacagagtcttgctctgtcaccaggctggagtgcagcgatctcagctcactgcaacctctgcctcccgggttcaagtgattctcctgcctcagcctcccgagtagctgggattacaggcgcctgccaccacacccagctaattgtttgtatttttagtagagacagggtttcactgtgttagccaggatggtctcgatctcctgacctcatgatctgcccgccttggcctcccaaagtgctgggattacaggcgtgacccaccacgcccggcctgtttatttatttatttatttttaagacaggatcttgctctattgctcaggctggagtgcagtggcatgatttcagctcactgcagcctccgcctcctgggttcaagtgattctcccaccttagcctcctgagtagctgggattgcaggtgcaaacaaccacaccaggctaatttttgtattttagtagagacaaggtttcaccaagttggccgggctggtctccaactcctgacctcaggtgatctgcctgcctctgcctcccagagtgctgggattacagacgtgaaccactgcactcggcctgtttttatgttttgaatataatgagtcaatcacaaaagtttagcaagcttactgttgtttgtgtgtgtgtgttaatttttttacattcagattttaaaaaccgttatttgtcacatcaactgtctttatgatgacttctcatatttcttgcttgtccctgagacaaggaacttgtgcctccctctccaacagggacttccctgatgccatgactggcagcactgcaggggccgttgtgggcccctgattctcacactgacccggctcaggcctagacgtccctgtctccctcctcccattcatcctcctgggagtggcctcctgagcccttctgggaccaggccctggcctgggtggaaagtctggctggatggctacccgcctcccacccttccccaccaccaggagcccagagaggcatctgaacctgggtgtaaacaacaaggggatgagatctatatcagaggcatgtgcaagaccaagcaaggcagcaggactttgcctaaggcacctgcgggtggggtgggagagtggggttaagctgaggcacaggccatgggcctacaccgcttcctgggcagccttccctggcctcccctcactatgttcagctcagcagccccccgccagctcgtgcacgctgctactggacttgtttaccttccttttttttttttttatgatggagtctcgctctgtcgcccaggctggagtgcaatagcatgatctcagctcactgcaaccttcgcctcccaggttcaagcgattctcctgcctcaccctcccgagtatctgggattacagtaacacatcaccacacctggctaatttttgtatttttagtagagatggggtttcactacgttggtcaggctggtctcaagctcctgacctcaagtgagcacccgcctcagcctcccgaagtgctaggattacaggcgtgagccactgtgcccggatgagacttgccgactttctgaacgacctctttctgcacgcagtgtcgagagggcagggatctctgtatgtcctgctctctgggcctcgggtggtgcctggcacacactaggtgctcaataaacaaatcagggctgcactgaatgctgcagatggattagccggggctgttcagacacaggagggacagcccatgcagggagaaagatgcacgggtctcagctcagctcctagactcgccacggggtggtgacgagaccacggcatccttgtgaggattaaactgtctcgatatctgtaagccatggagaagagcgcctggcacagggcaagcacatctgtctgtgactatttaaaggcagggcaagtttctggaagggtgggaaggaaggggctggggtagcttctggtgcccagtagagggtgcccctgagcttggtgtagctgggagcgccaggcatactcatcctgatctgagatggggacagggtggcttgcagaaaggtgtcccctaggaggagttggtgtggcgactccagctgggtgtggtggcaggggtgtgtgggtacaggctacatctgggaggctaggaagaagctggggcttccagatgagcaaggacaaggccagagccaggctgggctgtggggatgtagactgggactcagtggcagttctgagactgagtcaccagggtgcagcgccagggatagctacgaattaggaagcattacgaatcgcgttgaaaaaaccaagttctgcagccagcctgcctgggccgagtcccagctccgttactaaccatgggaccaggaccgtttgcaagtgtcttaactctcctatgcctcagtttcctcatctgtaacatgagaagaataggacctactcagggggctgtcgtgaggctgaaattcactgaccctgtaaagggcttggagcaatgctgggggcccgactgacattctcccgcccaccctcgctgagctgtagaaataattggtctattttctagacgagaaggcaggctcagagaggtgactcaacgccttagcgtcattcgtggaggggagaacgcgggtcttgtgcctctcaggactcgcaggctgctcaacagagatgtgggactgatactcccacccagcagcctgtcccgaggctcaggggccatgtggctttgcaggacgccaagcaattctacgcctttgtcaatttaactttaacaggtgtgagccaccgcgcccggccgactgttcttttctgtaagtgtgctgtgagtcatcatgagaaaaagttaagaagaaactgacaaagtatgggaaatcctatttgaaaagggtagaaactgaggctcggagtggtgacaaggattatgtgggccccgagatggcgctgctgagggaatgaagaggataactcagctggaatgagagccagggaggccgcagttagacacgaagtctcagcagcccgggaacggacggcagagggcgcactgctccctcctatccagaggacctcctggctgctggtcgcaggcccgcggctggggaatgtcccagttgacctcaagagaggtcagctcctagattcccctctacagatcctcccttccgccattttctttctttctttcttttttgccttttttgagatggagtctctctctgttgcccaggctggagtgcagtggcacaatctcagctcactgcaacctacctctgcctccgggttcaagtgattctcctgcctcagcctcctgagtagctagtactacaggcacgcactaccactcccagataatttttgtatttttggtagagacggggtttcgccatgttggccaggctagtttccaattcctgacctcaggtgatccaaccgcctcggcctcccgaagtggtgggattacaggcgcgagccaccgcgcccggccctcccaccgttttcttccttaaagggctctaactgggaaaagtctgtccaatcaaaagctccatgtttcatgcccctggagggatcagccgcctggaaaatgcgaactagtgggtaatttaaaagctattcttggtatttgccttgataatgcactatggccggggtttttatttggttagtttgggttttgtcttgtttttttttttttttttttttttttttgagacagagtcttgctctgccacctaggctggagtccagtggcaaaatcacagctcactgcagcctctgcctcctggcctcatgcaatcttcccacctcagcctcccagggatctgggactacaggtgcgtgccaccacacctggctaatttttgtatttttagtagagatggggtcttgctatgttgcccaggctggtttcaaactcctgagctcaagcgatccacctgccttggcctcccaaagtgctgggattacaggtgtgagccaccgtgctgggattacaggtgcgagccaccgcacgccgccttttttttttcaagacggattcttgctttgtcgccaggctggagtgcagtggcacgatctcggctcactaccacctctgcatcctgggttcaagcgattctcctgcctcagcctcccaagtagccaggtgcccgccaccacacccggctaatttttgtatttttagtagagacagggtttcaccatgttggccaggatggtctcgaactcctgaccttgtgatccacctgccttggcttcccaaagtgctgggattacaggcgtgagccaccgtgcccggccaggttttgttttttgtttttgcaacagaattaccatcctgtagctgccccactttggctgtctgggcctggcttctccacactgactctcagggtgggacagacatatataccttctgaggcacatggcaagcccatgggggctacagcttgctgggcgaccttggataagtcactcagagcctgtgcctccatttccacgtccataagatgggagaagtcatcctgccctcacaggaataaatggggttagatgagcgctccctgaccccctgctccagataaatgctttgaaatttttgtttctttttcctcatttaggaaaaggtgagcaaattccagtatagccttttttttttctttccagcttgcataggattttatacttagtatttttaaagcttaatttgttctgattataaaagttattggctgggtgtggtggctcacacatgtaatcccagcactttgggaggccgaggcaggtggatcacaaggtcaggagttcgagaccagcctggccagcatggtgaaaccccgtctctaccaaaaatacaaaaatcagcagggcgtggtggcaggtgcctgtagtcccagctactcgggaggctgaggcaggagaattgcttgaacccgagaggtggaagttgcagtgaaccgagatcgcgccactgcactccagcctgggggacagtgcgagactccatctcaaaaaaaaaaaaaaaagttattaaatgctctcactgaagaaaatctagagaataaagaaaacataaagaagaaattaaatatccctgtaatactaatgcaaagagaaaagaccctgttgaccttcctgggtgtttctcggtcttttaaaatatattgcttaagttttaaaagtgaattggagatcctattcacattctttgaaagctcagtattacgttttgagcatttccccatgtcatccactattatttgaaactctgttttaaatagctgcataatattccattgtaatgggcacagtgattcattgaacccaggggtccgcaacccctaggccacagaccggtactggtgggtggcctgttaggaaccaggctgcacagaaggaggtgagcagcaggcgagcgagcattactgtctgagctctgcctcctatcagatcactggcggcattacattctcttttatttaaattacaaaaaaatttttttttgagacagagtcttgctctgttgcctaggctggagtgcagtggcacgatctcagcacactacaacctccgcctctcgggttcaagtgattctcctgcctcctgagtatctgggattacagacacctgccaccatgcctgggttatttttgtatttttagtagagacaggttttgccgtgttggccaggctggtctcgaactcgtgacctcaggtgatccacccacctcagcctcccaaagcactggggttacaggcgtgaggcaccacgctcggccagcattagattctcataggaacgtgaaccctattgtgaactgtgcaggcgagggatttcgtttacttgctccttatgagaatctaatgcctgatgatccatcactgtctcccatcacccccagatgggaccatctagttgcaggaaaacaagctcagggctcccactgattctacattatagtgagtagtataattattttattatacattacgatgtaataataataatagaaataaagtgcaccggccgggcgtggtggctcacgcctgtaatcccagcactttgggaggccaaagcaggcggatcatgaggtcaggagatcgagaccatcctggctaacatggtgaaaccctatctctactaaaaatacaaaaaaagtagccgggcgtgctggtgggtgcctgtagtcccagctactcgggaggctgaagcaggagaatggcgtgaacccgggaggcggagcttgcagtgagccgagatggcgctactgcactccagcctgggcgaaaatgagaggctctgtctcaaaaaaaaaaagaaaagaaaagaaaagaaaaattagccgctcacagtggggtgtgcctgtaatcccagctactcgggaggctgaggcaggagaatcgcttgaacctgggaggcggaggttgcagtgagccaagattgcaccactgcactccagcctggtgacagagtgaagcaagactctatctcaaaaaaaaaaaaaaaagaaaaagaaaaagcaatgcaccataaatgtaatgccaaaaccatctcctcgacaccccagtccatggaaaaattatcttccatgaaaccagtccctggtgccaaaagggttggggaccgctgatgtaaccagtcccttgtcagcaggagttgaggctacttctaaacgttggtagtcgggccatccttaaacacaactctttgaagcccctctaataatttccttaggatggattggtttgttccttaagctggaaccacacttgcttgccatacaacctcatagccggccccaggagggacccagagccgcccgctaaaagccttgggtggattcagtggtactttgttaaattaagtacatgaatatcctacggcccggcaattccctctgggtatatattccacagaaatgatcatgcagctcccagaggggtcctgagggaggatttgcggtggggcagctagaagcctccgggacgtccagtctcatcaggaagcagtgggggacttggcagatggacgggggtgggtgcccatcaattctgtagcagcaacagcagcagagtggacacacacagcaatatgaaccactctcagaaacacaggccgagcgaacacagtgagacaaagacagcgatcttaacgcagcttcatctgcataaattaagaatacgtgtacgcaaagcaacaatacccattttgcaagaacacacacaagcaaaaaatccacagtaaacacattaggaggactttctgtggggagagggtaaggcggggatatgaggataaaagggagggaaggaggaaggagccagtccggtgaggaccaggtacctgactgaggagcgaggagtggacaggctgggcccagccgaggtggtgcaccttccccccaggtcccgaggagatggaggcgaagatctgcacccggtcttctcccagggggccagggcatgtgagctgcggggaggcagtctcctggcctctgccttaaaaggcatttcctgaggctccaggcttgcaggccccaccaatctcaaaaaacagtggtggggccggggcagggcctcagagaattgctgatttttttttttttttttttttttttgagacggagtctcgctctgtcactcaggcgggagtgcattggtgtgatctcagctcactgcagactccacctcctgggttcaagctattctccttcctcagcctcccaagtagctgggactacaggcatacgccactatgcctggctaattttggtatttttagtagagatggggtttcaccatgttggccaggctggtctcgaactcctaacctcaggtgatctgcctgcctcagccttccaaagtactgggattacaggcatagccaccgcgcctggccatgatattttaaaaaacacatcctctgtcttactatggggaccacctactgtctctgtcatgtggcagaagaacattttaactctctcaccaaagatgaatggcaacgttctagcttcccagagagaggccagcaccgtcaccccgtggacttagagtcccccaaagtccccgcgaggttcttgctgcccacaccgcacccaggccaggggcaggcgagaacaggagtctctgagccaccccccagagctcacgggagggcgtcgcagggattcgcgtcggctcccaccgacagatggctgcaggcctctgccaaggatccgggcaggagttcgggagctggcctcccattcagaggcaaacaactgctgggcacctcctgtgtgccaggctcggccctaggtgctggggatccggcagggaacattgcaaagtccctgccttcatgcaggtggcagcgcggcgggggacagatgacaaccaaggcggcaggtcacacgggaggctctggaatccccagaattcagcctgccgctaccaatgctccagtgccaggccctggtgtgtgtgtgtgtgtgtgtgtgtgtgtgtgtctctgtgtgtaagggagaagtacactcaaatgaggaagccacatagaactcacagggcggtgcttctctcatcatccctcagacccagaaactccgcttctaggaatttatcccaagggcagagtccagaacattaggaagaatgagccaacggatgtccccccggtgttgttcatatcaactcagaaattggaaataaggaggccgggcgcggtggctcacacctgtaatctcagcactttgggaggccgaggtgggcggatcccttgaggccaggagttcgagaccagccgggtcaatatggtgaaaccccgtctctactaggaagtacaaaaattagctgagtgtcgtggtgggcacctgtagtctcagctactcgggaggctaaggcaggagaatctcctgaacccaggaggcagaggttgcagtgagccaagactgtaccactgcactccagcctgggtgacagagtgagcctccatctcaaaaaaaaaaaaaaaaaaaaagaaagaaaagaaaaaagaaaaagaagggcctggttaaataacaggatgctggctgggtgtggtggcttgggcctgtaatcccagaactttgggaggccaaggcgggcagatcatctgaggtcaggagttcgagaccagcctgcccaacatggtgaaaccccgtttctactaaaaatacaaaaaattagctgggcgtggtggtgtgcgcctgtaatcccagctacttgggaggctgaggcggtagaattgcttgaacgcgggaggcagaggttgcagtgagctgagattgcaccattgcactccagcttgggcaacaaaagcaaaactccatctcaaaaaaaataaaaaataggccgggcgcagtggctcatgcctgtaatcccagcactttgggaggccgaggcgggcagatcacgaagtcaggagatcaagaccatcctggctaacacagtgaaacctcatctctactaaaaatacaaaaaaattagctgggtgtggtggcgggcacctgtagtcccagctacttgggaggctgaggcaggagaatggcgtgaacccgggaggcggagcttgcagtgagccgagatcacgccactgcactccagcctgggcgacagagcgagactccgtctcaaaaaaaaaaaataaataaaaatataaataaaaataaaaaaataaaaaagctaaaactccatttacaaatcagcagcaattgtgcaacacactgtgcatgggtggggagggtgtccgaatgcaaagacaccaaagcgaaggagagctacccatggctgtgggattatggttggcttctgtcttcctgtttttacttaggtatattttctagtttttctcaattaatttatattcattctgtaataagtaattaaaaatacacttatggctgggttaggtggtttatacctgtaatcccagcactttgggaggccaaggtgggtgaattgcttgggtccaggagttcaagaccagcctgggaaacatagtgagaccctgtcttcataaaaaagaaaaaaaatcgagaccatcctggctaacacggtgaaaccctgtctctactaaaaatacaaaaaattagccggacgtggtgggtggcgcctgtaatcccagctactcaggaggctgaggcgggagaatggtgtgaacccaggaggcggagcttgcagtgagccaagatcgtaccactgcactccagcctgggcaacagagcgaagactccatctcaaaaaaaaaaaaaggtcaggcttggtggctcacgcctgtaatcctggcactttgggagtccgaggcgggcagatcatctgaggtcgggagttcgagtctagcctgaccaacatggagaaaccctgtctctactaaaaatacaaaattagccgggcgtggtggcacatgcctgtaatcccagctactcaagaaggctgaggcaggagaatcacttgaacccaggaggtggaggttgcggtgagccgagatcacgccattgcactccagcctgggtaacaagagtgaaactccatctcaaaaaaaaaaaaaaaaaaaagaattagctgggtgtgatggtgtctcccagtagtcccagctactctggaggctgaggcaggaggatcacttgagccagggaagttaaggctgcagggagccatgatagtcccactgcactccagcctgaatgacagagtgagaccctgtctctaaaaatgaaaccatttacatagagacaggaaagagccaggaaggcattagaacaaaatgtaaacagtagttatttatatctggtgatggaactagggtgattttttcaattttttatttggataactaaagagttattacttttttttttttttttttttttaagacagggtctctctgttgcccaggatggagtgcagtggtgaaatctcagctcactgcaacctctgcctcctggtctcaagcaagcctcccacctcagcctcttaagtagctgggaccacaggctcatgccaccatacctggctaatttttggttttttagtggagatggggatttgctgtgtggctcaggctggtcttgaactcctgggctcaagcaatccacctgcctcagtctcccaaagtgctgggattacaggcatgagtcaccgcgccaggctaaaagttattactttttaaagagcctctgggccaggcgtggtggctcacgcctgtaatcccagcactttgggaggccgaggcgggtggatcacctgaggtcaggagttcgagaccagcctggccaacctggtgaaacctcgtctctactaaaaatataaaaatttgctgagcgtggcagcaggcgcctgtaatcccagctactcaagagactgaggcggaagactcgcttgaacccgggaggtggaggttacaatgagccaacgttgcgccactgcactccagcctgggagacagagcgagactctgtctcaaaataaataaataaataaatacaaaaataaagagcctctgattaccctcgacgtggtccatgcctcttgctgtctgggatgtgtccactgagggaggccaagcccactgacaaacactcacaagcatccactctcgtggactggacgaacacaccctccatccatgtctctgggtggggcagggggcggtgcaagaacccctgggtggggaggatgagaaatagaggcgtctggatccctattgatgcttttcaccctttgacaatgtccaccttgggtgtgtgctttaccaggtgcatgatatacggagggagcgggcctgtgcatgacttatcataaatgaatgtacgtccgctggtggcgctcagcacgtttgtgggactgaattgttcactgagccccctcgcccccccacaaagagaaacgggtccaggttctacgacggggatgttgccacggcctggggctgctggtgagtggcgtgggtgcctccctgtcccacgctctccctggccatttctgcaaagcgcgtttccctggcgtgccgtcccagccactggctccttttcctcctcatttcttccccactagaatgtgagctgccggggctagggctgggctttgcctggctcggtcaccacccaggacagggcttggtgcagagccggtgctgccggtgtctgttgaacgtcacgtgtataagtgggggaaggatggagtgcagggaagccgggggcaggtgcatggggaccgcacagtgcggaatgtcacctgctcaagggagatgtggatggatcggtggagactgcaactagggagatgcagggcagactcaaagcaaactggcagacatgggagcctgtgggaggtgggcgtggacagagggacaaggccctgcgggagcggggggtggtgatgtgacgacgcccctgacgtttctggaccccttcgctggcccttgccccacagccaccaggaagggactgctcccctgagaggtcccttttcttccctgaatctggctctcaggatggtcagatgggagcagccaagtcctcccaccctttcccagggacagaccaggcagaaaagcagccgcatttcttacgggagctgttacatctggaagattagatctggaggggctgggacctctggcatcggcaccctcttctctcccagctttacaggctggaacaggaggaggcttgcttggaggcaggagttggaccaaatcagcctggggtaatgatcccctgggaatcactggcaatgcctggagatatttttggaactgggggtggggtgctactggcatctagtggccggaaatgctggtaaacatcctacagcacacaggacagagccccccaccctgcccgccaaaggatgatagggcaggccccaaatgtcaatagggcagaggttgagaagccctgctttctaatagcacagctctgtccccccaagccctcgcttacggcctatcctaatcagagtcatcattaattgagtggcagctgccccatcctgagcaccagccacaggccaccatggcgccaagcaccacagcgttctcagcctctctgctctccaattctcacaccagctccaggaaatggggacgcaaaccctgcactgcccggcaaatgaccatggaaacgcctcctgtcctctgaccactcgccaggtgccagcacacaagctaacgccccaataagtaccagacccatcagccctcacagcaacacctcaacgcaggggcttgcattgtccccgcttttcagatgaagaaactgaggctcagaatcatgccgtcaccttcccaaggccacgagagggtgtggtggtgcagatgccacaggggtccctgtgaaagggttgctctccacaccccagggactccagggctcggcctaggccgacccgcctgtcctgtgccgggggggctgggcaggtggcctgcacttgggccccgacacggtggctcagagacagggagcactgtgctctcaaagcccggagggcctccactccacctcgggagcccggctccagctgataggatgcagacccgcaggccacatccacaggtgccggagacggggaagccccggtgtggggaggcccagaagggatgggctacatctgcatgcctccccagtgtcccctccaaggtccccctctgcccgctggccccgcatacctggatgccgttctcttgcaggttcaggtaccgcgtgttgaccgggatgctggctgggacctcggccaggtctctccgtgtgcagatcacccggctggcctggttgctgcaggagcaggccacggggcaggaggtggccggcggggagccccctccggcggcagacgtcacggccactccacctccaccggcccccaggggtggggagaagagccagaggaagagcaatgccccgtggggccaggacatcctaccgggcggcagcggggggcacggggagccgcgggcacgcgccatcctcaatgttcatgctccgcgtggacgctggggggctgtgggtgggggagagaagggggagaggcttggtgagggacaggagcccatgtggcctgggtgcttgccaacacccaggcagccccatcgccgcctccctgccccatgcccagaacaaagggacagggagggagacagctgccgatggacccacccagcaggctggggcaggcagagggaagcttggcccgcctggccctgcactagctcatcctctccatgctggcaagattctacgcccattctgcagcagggaaaactgaggctgggggagaggaagtgcctgcccaaggtcactcatccagtaagtgcagaagttgtccagattcaaaacccagttctttgcatgacttcaaaaaggtagatacatcagaggagtgagacagacagacagacagacaaggcgagggggcagaaacggggaagagcaagcgaggtggcgaggacctcgctcccatcccaacacccgcccggtccccttgccacctgcgtgatcacctgggaggtgggtcccagcctcctctcccctccactccctccccctctccccatcccagggatgttagcgaagagatgcatttcccccaccccctgtgccctcagctaaaccgaaagaccctccgctgcacaccctcctgtcactgcccaccctgtccaggccctgtgggggcctcacagcagcttcagagacttgagtcagactcatgggagaatctgagggagagagaggtaaggtggcagacaaggcaaccgtggaggtgacaggtgtgggcaggtgaagggagggctgggaggcagcagggtgaagagggaggagactggagcttgtgtgtgagggtggctggggacctgacggggggcggcacaggccgagaggccaccagctgcaccccctcctttgccccgagactgtgggtgctccaggcagagacagccccgatgggactcatgccagctgctgccgcaggaccgagcttggttctcggggaggggatggggaagggaagggggtccagggactctgcctgggttctgggaggaaagcagacagcggggactcgggccctctgagaagtcacgctgtacctccccaatctgtcctgccccgccatttccatggaaccagagagggaaaggggatgggtgagtcacagcaacgataccagtaacaatagtctctccggaacactgggtgagcccttgcaatgcagcaaactgtatcccggtcatctcatgtgagcctcataatgaccataggagaaagctattaggatgcccaatttacagatggggacactgaggcactatgagggaaaacggcctgtccaagggcacagagcaggccgggagggcgcagagggggtacttcggccctgggtctaccctctggctcccagctctcctttgcacgcagcatctctgagtacacacaaatacacccacaccagcaggccctgccccaacacaggccaaccccaaaccattcccaagagaccaggaggagggcaggtcacacaaacacgcacaccgacccactcacacactcagcagtgatggggcacaccctctcacggtggactctcaggacccccctctcacggtggactctcaggacccccgacacaggctcacccccaggcacacggctatgcacacacacagtcactccctcctcctgcagtttccaagaccattttaacccagataaaaatgtgtgtgcatacgtctgtgtatctgagtgcatgtgtgagagcgagggctagacagagacacagagagacagagacagaagcagaggcagagagacagagggcaggggaaagagggagctggggagagaaagagagagaggttgattctgtgtccacccgggctcatttttctcctgcagggctggggccgtgtgtctgtgtctgactatgtgagtgcggtgagggtcttcattttcctgaatgtgaacagggaggtcaatgcccagtccttatcctgggtcaggggctcctacctcttaagaccctggcgatgatccagcccacaccctcttagccaaagggctggcccaaagcgcagggcctggatttgaggccgggggaccccgcagggcctgtgggagcccacggcacccaccccggcctccaggcctgccgctgccatgtctacctccgcatctgtccccagctctcccgctgccagcccgcatccccccacccccatcacggcttctgcagcgactcggcctccctccccttccccccgccgccctccgccatctcccatccttttctccccacaaccccacggtgggggacactcaccctggtggcttggcttccgctgggcctctccctgcgcccaggcccccccctccacatgcctccggccagccggggtctctgcctccccagttctccagggcttcctgtcgagatcgtgctggggggggcgcaggggcttcttgggtctccccgcgccccccccactggcctgtcgcccttcccacccctggggggggctgtcctttggccactgcagcagttctctgctcccctccccgctcgcctcctccggtctccttccaccccctctcccacctctacctcgactctcccccgaccgcagcctcctttctctccacccaccgaccccagcccccttaactctctctctgcccctctcggtcctccccctccgcctctggtccccgtccacctcctctggcctcaaccccctcctgagtctcccccctcacaatcttgcctccctcgggacccccaggccccttctctccttctcctccatctattcctccctcttgctctatccctgtcaccctctcatcggccctgagcccgtctcagtcaggttgtctgtctgtccgtctgtcttggtccctttctccccggctctgtctgtctctctctttctccgcgattacaatttctagtcacacggcagtgcagagccaagctgtgcctcagctccctccctccccacccctccctccttctttctctccttctgaacggggagggcgcctctcctccctcctcctcagcctcccttccctgcgccgcctgggggaggcctccccctcccccgctaatcaaaggctccgttatctaattaacccattggttctgggcagccgaggaggcagccgaggaaggtcgggggaagcgggggaggaaggttgccggctgggctgcccaagaaaggggggtggttgggccgtgccaagccggagcctcatggcacacagacagcctcgttggctgcatgaccgggctgggccaccactgaccccctcgcccccacttccagccaaaaccccccagcttcacaccccccactgggtctaggcacacaatcttgcccagcgttttcctgcagatgcccctgtaccccaggaactcctttgaacccccaccatgccacacagcctttactccaaccctgatataccacacctgatataccggcactggaacctgcgccctgcaccgtcaccccgtcccgtggctgagggccagcccctctccatgccacaaaggcccccacccctagaggaacccctctcccttggaccttagccagatcctgacatccacctcctgacacacttctgcaaaatctgcagggcagccacgttcattcattcaacttatccgcccatccatccgtccatccatccgtccacccatccgtccatccatctgtccatccatccatccatccatccatccatccatccattcatccatccgcccatccgtccatccatccatccatccatccatccatccatccatccatccgtccatccatccgcccatccgtccatccgtctatccatccgtccttccatccctccgcccatccatccacccatccatccatccatccatccgtccacccatccatccttccatccatctgtccaacaaatgtctacccagtccctgctatgtgctagacactagcccaggacacccatgggccacaaaaggcacctctcgagagtggggcacattggtgagtgccgagaggcctgggtttgagtcctgactctgctgccacttcccgtgtaacctcgggccggtggcttattctcccaagctgcagttccctccactgtgaaacagggataatgggagtatctgcctcctagggccactgtggggattaaatcgctaaatccttggtaaagagttctgtcttcacaacatatgcggaatcagaccccagaatcagaggatctttctccccacgcccaggctacttccctgacctggctcccatctccctcttgaacgattacagtgtcctcccctccagcctccccatttctgccttcacccccactccccgtgcgttccccacgggcagcgaggggtatcctgtcaacaccccatggaccctgccccgcctctgctccacagccttccacagctcccgtcccactcagagcagagatgaggacttcagttttcaggtctccactctccaccccagctcctcctctgacctcatcgcttccctcctccccctgctcactcgctgtttccagaacaggccgtgcacaccccggccccagggcctttgcacctgctcttcccttttcctggaatgctctttgccggttgtccacagggctcttgccctgctctctatcaggtccgtgctccaatgctaccttctcagtgaggccgtcctgaccgccccgcatcaaacagcacccctatccctctccagaaccttctctgtttcctttttctccatgacatttatcagcatctgagcttttatatgggtccgtgcgcttgaaggcaagtttcccgagggcagtcagtttgtgactatttggttcccaggacccacaacagtgctgggcacatggcagttgctcaccaaacactgggtgcagggacggatgggtacgttatcatcactgtgagtctatttccccccacgctcacacacagatacccccactctccgttctgcacaccgagccaggccgcactgcaatagctgcacaatgcaggctcccagccctggacaccctcggtccccaggtccccttccatcccaggaggcctgctggcagaggcagcaccttttttttttttttttttttgagacagagtctcactctgttgcccaggctggagtgcagtggcgcgatctcagctcatggcaacctctacctcctgggttcaagcaattctcctgccccagcctcctgagtagctgagactacaggcgctcaccaccaccccggctaatttttgtattttaagttagaatcgggggtttcaccatgtgggccaggctggtcttgaactcctgacctccagtgatccacctgccttggcctcccaaagtgctgggatgacaggtgtgggccaccgtacctggccgaggaagcacacatctcacgtcagctggacaccaatgtcccgggtcaccctccatgccctgggtcaccctccgtgccccagcaccacccggatggctaagtcccagatactacacctcaggttccaaacaggaggtccccagcgcagctccgtgcacccagaggaaagctaccactctgcccaaacctcagataccacctgcgtgagctacactcctggatacagctgcatactgagagggcacctggccccagttgtccccagatagagccctctgacctggataacaggaatgctggctaacctcatctcttccgcacacacatctgacttgcgtgaactcactgaataatgacaccaccaaaggtggtaacgtccaacacacatctggcactgactgggcaccattctgggagctttacttgcattagccaccgcagttcacatcaaccctctgagagaagactgctattacacccagttcccagctagcaaagctgagacacacagaggtactgttagttgcctaatgcgaaacacacggctaggaagtggcccctcctaggtcagccttgccagagtccaggggccccaaagacccccaagtgtggcctgacagcagcaacaattcccatggaggctgcctgtgtgtggggggcagggtgcaggcaaggccacaggcatgctgaacagccacccttcctcagcccctgcagtcacccgcactgcacaggatatcacacgcccgacaccccaccacggcttcacgcccggctggcagaggctccatggactgccctctgcccccacgcacccctagtagtgatgggaaatactgattacatgtgggtgccatgctatccactcctcaagctgctggcttctccccacggccctgggaggaagggatggttcttgtgcccattttacagattcagaggtgagcggcacttgccaaaggttacacagccctccagcagcacagccggcattggaaccccagtcccagaacttagccaggtcaccacggttgcctctcccaccgcagctgccccgggagaggacccatcacaagggtacacctgttctcctccctcacctggtgcaaggaacaagccagaggtgcagacacagaaggaccccaaagaggagaagtacgaggggcagagagtggcagagtcacagggagacagacacaggcatacaaaggggcatgaaaggggcaggaggacaggaggccccgagatggagctgagatccaggcgaaggcagaggctgggagggcccgggcactcgaggcgtgaagctgagtcctcaccggcttcgccatcctccccagccccagctctgagagatctcgggcactgtgcctgggaggattcaggcagatggcagatcggaaactcggggacccaggagaggcggggtgaggagaaatgggaggcagggaacgttcctgtcaggcgcactcattttttggggtggggtggggggctaaattcagacggccagagggaagataggaaattgactaccattgcagcaagaggcctggaggttagagctagagaagaacttccccactgcgagggactggggcagaagtggagcctggagcccagagggtggagagggattgaagccggggagggatgagcccttctgtccctggaagccggtcctatgggagagacccgggttctgggggaggggacaggcagcgctggcgttctgagccaatccatgtcctgaatgctttcaaaataaaagcagccccacagcgccgagaattgtcaggcttctatgtctggaggtagaagaaccttagggaaagggcagtccaggccccctaggagctgctgatgaggaagcaggactaggggcttggctcagctcacgaatttcccgggccactggccactgggcagcaggaccaacaggcggcccgtgcagtgggggtgcagtcggggtgggggtgaggtgcagtgggtgggggtgaggtggtgacttgcttggaggggggctgtcctttcccgtgcagccacgccgctctcccccaggctcctcccacccaccaggcgcctcccacccaggctcttcccatccacaccagacccgttcccctgaggggactttgcccctgctgtgccctcggccagccgggggtgctcttcctggggtcagggggggctctgcgttcccacgacacctccaggaggtcttctttgagctccccctaccgtccgtatcccttgcacttccttttcttcacagctcgtgtcacggccacccagcacctgatgctcggtgatttgttcctgcgttcattgcctgccttcctgctaagaggggagcccctgagggctttgccgcggcgtccacggctgcatcctcaaggccggccaacggcgctggcccctccgagcctcagtatttgctgcaggaacgagcgagccagcgccccctaccggcagttcctctgctggcacccgaggcaaggagccctgggtctctagggaggcaagtgtgggggtgggggagccgtccgagggctaagtgagagggcgggcacagggtgggccccggaacgtccaggagggaagccgggaggagggaatgtcgagctgttacagaggccgtggcaatgggccgggggcgggggggccctccttcctctcacaacgggctgtgacaacagaggggcaggctcagctctggtgggtgaaggacccctctgagtggactggagcggcgcggctggaggccagggaggagctgcgccaggggtccgggggtagaggatgaggccgcggctggagccacggggatggagagaagggaaagagtgaacagataaagcaaatttgtaaaagtggcagaacctggaggcggtgtaggaggtgagggagagggaggagccaggctcttcttatagatctggggtcaaattccaaaagccagaagaggatgtggggcgggaagcagttacggggagaagagaatgcaaaagtccctgccacaggccccccagccccaatctccactcacaggcggtgcctcgctctggtcacacccacagggcagcaggggagctggggacacaccgcccacccggctcccgtccagtccctggctgtgccactttgggccagctgcagcctctctgatgatgctgcatggggctgtggcaagggggcccaagtagggcctggcacacagcaagtgaccagcaagtgacatataggactcggagcctggctggaagccaggaaaagcagaaacctgggctccgaccccccggtgctgccaattttccgctaggaacagtaccctgtggccactcagtttcctcatcagagaaatgggaattaacagcaggtttcagaagagggctgggagggctgggtggggggtggtggggacccaggaagggctgaggtgagctatttaccagccagcggaggactacacttgacccttgaaggacaggggtttgaatcgtgtggtccacttatatgtggactttctcctgcctctgccactcctgagacagcaagacaaccgccccctcctcctgctcacagcctactcaacgtgaagacaatcaggggagcccgttacgatgatacactccacttagtggctagtaaatgtattttctcttccttagcattttctcaataacattttcttttctctagcttactttattgtcagaattcaggatagaatacatttaacatgaatgtgttaactgactgtttatgttattggtagggtgtccaatcaacagaacactattaggagttaagttttaggggagtcaaaagttacaggcagattttcaactgcacagggggctggcacccctagcccccaagttggtcaggggtcaactgtatacatacacacacacacacacacacacacacatacacacacacatacatacatacacacacacacatcacacaaatttctgctggagtgcagtggcgtgatctcagctcactgcagcctccacctcccaggcccaggtgatcctcccacctcagcctcctgagtagccgactacaggcgtggaccactacacccggctaatttttttgtatttttgtagagataagcttttgccatgttgcccaggctggtctcaaactctcggcctcaaacaatcctcctgcctcagcctcccaaagtgctggattataagcgtgagccacggcacccggctgtatttcaatatatcaatgcatcactgtcaaacagactctctgcaatgatgcaaatgttctctccgtgctgtccagcactggtggccaccagccacacgaggctacggagcacgtgacgtatgtcgagaaggagcagggactgaattcttcattcgacttgatgtgactgttgctgctcatgcatggcagtggctgtggcagctactgtgttggacagcatggatctaaccactgatcctgcttggaactgcttctgcctgagtccctgaagtgccgctccgtctgctccttggccctgcccagctacctcacagggctcttatgggactcatggagaagccagggagatcacagctggagaaatggaatgttatggagagtctgaggcctgagcacctgaccagcgctgccttggttgcctgtgccaggcctgcgctgcgggagctgcctgcaagagctcattcagtccccgcaaggggcccatggcgagagctgctgctgcccattttacagaagggcacactgaggcactgccatacccatggatagccagatttgggtaggctttgagataaaaactgaacttccaaaaaaaaagaaaaagaaaaagaaaaagaaaagagggccgggggtggtggctcacgcctgtaatcccagcactttgggaggccaaggtgggcggattacctgaggtcaggagtttgagaccagcctgaccaacatgctgaaattccacctctactaaaaatacaaaattagccgtgcctggtggcgggcgtccataatcccagctactggggaggctgagaaaggggaattacttgaaccgaggaggcagaggttgcagtgagctgagatggcgccactgcactccaacctgggcaacagagcgagactctgtctgaaaaaaaggaaagaaaaaaaactgaacttccaggtccctggactgtgattctgtgctgggatggggcggcttaacacccctgaactgaattcaccccagaagagaactgggccctggcctggcattggtggtttttacaacagtatttgttgccaaggctcaggcagtggggcgtgagagcgagtttgcaggttgggaggggcgtggcccccgccagctccactcataggggtcctgcctaggaaggacgctgatccgatctgttttctctcacagggttgtgcatagttattttgtttacaacaaaagggtgctgctaaaagtcataaaaagctgaaaactatgtgaactggagcaatgcttctcagacatgaatgtgtgtccagctgtctgggaatcttgttaagaggcagattctggccgggcgcagtggctcacgcctgtaatcccagcactctgggaggctgaggcgggcagatcacttgaggtcaggagttttgacaccagcctgaccaacatggtgaaaccctgtctctaataaaaatacaaaaattagctgggcgtggaggcacctgcctgtagttccagctactcgggaggctgaggcaggagaatcacttgaacctgggaggcggaggttgcagtgagccgagatcgcaccactgtactccagcctcggtgacagagtgagattctgtctcaaaataacaataacaataacaaaaaactgcagattctgcatcgccatatctagggtgaggctgtcattctgtttcccaggggatgcaggtctcacagcaaggggctgaagggtctctaagtgcccatctcactcctatattccatttcgggatgaagaatgaagccccctcctctcctctccggagctctgtataggggtgtagctcaaggtgggccttggaatcaactagacctgggtttgaacctcagctgccacagttactagccatgttggcttgcaaagggagcttcacccctcaggacctcggtctgctcacctgtaggtggggaaggtctgatatctgtgatgagtttagggaaatgcctggggcataaaaggaaaatgctcagtgaacttattccaggatccagaagatcctccttctcctcgtctacctcatcacaccgtcctgtgaagaggaaggatggagaggtggaaagagtgttggtgttgaggaaaactgggttgaaactctggctggccactttctccctgtgtcccccgccccaggctccgccttgcagtctgtgaagataatgacacctattaatagcttgttggggttcctggagaccatgtacagtgcttgacacttaagtgacagctacattaaaagttatcatttattctcggccgggtgcagtggctcacgcctgtaatcccagcactttgggaggccgagacgggcggatcgcttgaggtcaggagttcaagaccaggccggccaacacagtgaaacccccgtctctactaaaaatacaaaaaattagccaggcgctgtggtgcgtgcctgtaatcccagctactcaagaggttgagacaggagaatcgcttgaacctgggaggtggaggttgcagtgagcgaagatagcaccactgcactccagcctgggtgacagagtgagactccgtcttaaaaaaacaaaaaacggtatttattcttacgggtcagaagaacaaacagttttcccattccatgactcagccccctccccacccaaccccgccacttctctgccattgtaaatccagcatttctggctggatcaaaaccactcatctgtcaaggagtggggggcccatgggatcacatttggggtctttgcccttcccgcaacaagatcctacaacccccacgtcggtgagggctgattctctactgtgagaatcagcatggggagtcctttcccttctggtgcttgagaggcataaacaagattgagaacctgacagcccctaagttatagcagcttcaatgccttcaaaagtctagacttgttggccgtggtggctcatgcctgtaatcccagcactttgggaggccaaggcaagaggatcgcatgagctcaggaattccagaccagcctgggcaacatagtgagaaccccctctctacaaaaaatacaaaaattagctgggtgtggtggtgcacgcctgtaatccctgctacttgggaggctgaggcgggaggatcgcttgagcccaggaggtcaaggctgcagtgagctgtggttgtgcccctgcacttcagcatgggtaacggagcaagaccctgttctcccccaactccaaaagtctaaccttctatgagtgtattgttattaacaacctaattattgtgattattaacaattttatggccgagtgcagtggctcacacctgtaatcccagcactttgggaggctgaggcaggtgggtcacttgaggtcaggaatttgagaccagcctagccaacacagtgaaacggtgtctctaccataaaatacaaataaataaataaataaataaataagccaggtgtagtagtgatgcgtgcctgtagtctcagctactcaggagcctgaggcaggagaattgcttgaacccaggaggcagaggttgcagtgagccgagatcgcgccactgcactctagcctgggtgacagagtgagaccctgtctcaaaaaaaaaaaaaaaaaattgaatttccacttttagggcccaatggaccagtgcattctcctctcttggcctcagtttccccctctgtaaactgggagtctcatggagggaggcgacctgcagggcggcccacaccagggtttggagtcccggctctgccatttctaggtgtactattttgggcaagggacccacctctctgggcctcagtttccccatctgtcaaaccagggatgatgactgtgcctccttgcagggttgcctgaggaatacacggaaaaaatccacataagagactgagcactgagcctggctcgtggcatgctctcaatcagttagctacgatcatggtcatctccagctctggagagagggtttgaggcaaggggagggccaatctcctctgcgtttaccccctggggctggcctctgcagtggagctgtggctgcacagccttctgacctttgttgtagtgtttgaacaagaactctggggcctaagctcaactccctgggctggggcagcatctggggggcacagtgagcctgggagtggctggggctgctgccccctcctgccctgcctcactctcttcctcctctccatccagggtttttttttttgtttttttttttttggcgatggagttttgctcttgtcgtctaggctggagtacaatgggcatgatctcggctcactgcaacctctgcctcccgggttcaagcgattctcctgcctcggccccctgagtagctgggattacagactcacaccaccacacctggctgattttgtatttttggtagagacggggtttcaccatgttggccaggctggtctcaaactcccgacctcaggtgatccacccgcctcagcctcccaaagtgttgagacggcgtgagccaccatgcctggcctgtctctgtctaggtctctcaacctcccaccaggatcccagatactaccagacaccccccattctcactctcagcagccctcctggggaaacagcagtcccctgggctcccgcctgcctcccgcagtgagcccccatcagcccctctcgtgggtctccaaggcagcccctccacctctgcctgccatgacaacagttgcgcgtgggtttccaggcaacaaggggcatcctgccactctccttactctcctgccaccccctgtctggcggagccagcccagcctcaggaactgggactcgaagggaagggaggttctccccagtggggacaaagggtctccaaactcagagttaatgaggtttcccgtaccccaccagagaggacacaaagacgtgcccccttcacccagcaagggtgatggtggaggggatgctgctgggcttgagcgctgccaggcacagaggggagccctgtcctttgcacccctatctggaggtgaggccctccctccagaaacagcgtccgcatcccaggtcctctaaggcagcccctgctctccacctgctctggggccaaatgtgcagcctggtgtacagagaagcccaccccctgcctacgggctgtgatgccacatgctggggacaagagtgtggggtctgtggcccaccccagccatcagccagctgagaaggacaggctgcaacatggtgccttcacgcaacgctgactttccaacactgtgaggggctggcagtttcacagcagatcctggtcctggagaatgggcgtgtgctctgcgtcctggcagtcttaagaaccacttctcccagagaaggataagactcttcctgctctcggcaagggaaggaggccatttaagtggaaacagggcccagtcaaagtgaggcttggagttagggcaaactgatggggggatgaaggaggaggggcagagagaggacccggcaagggaaaccaagggaaggagagtggagagggtgacagggcacaaagagatggagcagagaggaagaggagcaaacagcagaggttgcaaactcctctgtctatggagcccagcagggaagatgatcccgatgctggttagaggggagagtggggagtggtggccctttgcacctgagcacaacccacagttatccagggggaagacgattccaaaagctgacagtctagatttttatgcaaaatctctaatttaaaaaatgttggcaacaaattaaacatgttgaaagcactgggggaaaataaccctcttgggccgcccggaggaccccaggtaagtgagtcctcagggatgtggggagagggagccacggggaaggagcaggggaggcggggaggcagacaggctggcaggaacagcagcagaggtgagggcgagtgacacagagggacaaagaagggaggcacagagagcggtgtcgagcagagacagaaatagaggcaggtttcacagcagatggggtgggagagggaaagactgatgaatgagtccacagactagacggatgggccaggtcagcaagacattgggggctgggagggcaaagggtcagtcccagggaagatgaggggagatggagaggcgagacggcttgacagagacaggaggtccaggtgacacctcgagacagatgcccggccagagagagtggggtgagaagggatgaaatgcagggagagaggatggagagagagaaccagtgtgagctacacagcaggtgtcctagcaggtgagacaggtgattgagggggtggggaccctggcaagaaagcagggccagggttccggaagggactgaggattcagcggccacccccgcccccaatccccaacccacagcacctctgcctgaagatcggcctctctgcatgggccctgagggtgtgtgtgcaggcacatgtgtgcacaggctctgcttgtgagagatgccagcgccctctgatacctgatgtcttaattctgctgacctctcggacggcgaggaggtccctgaggagccccgtggcgagaggaacactctcagggctgtctctgagtgggattaagggtgactgctggatggggctggccctccctgcagtgcacacacgtgcctccgacgctggcactcggtttggtgtgtgcgccacagtgcacagctctgtgactgtcttagcggcacctggggctgcatctctgtagctctggggccacctccgtgccttttgccttgtgtctgtccgtaggcgtgaggccacgaggccacaggaccacaaggcaagggcctcctgcctttgtctctccctccaggtctgtgtacgaaggactgtgtgtgtctctgtgtgacacacgactacaggtctggggactgctccctgtctctcctgaccactggctgactgagtgtgggggctgcgtctgcaactgggcctctctggttccatatcggggtctctggctgccagtgaatgactgtgtgctctcgtgtgtgtgtgtgtgtgtgtgtgtgtgtgtgtgtgtacctgccaggggaatctttgcctccacgtgccccgtgtcttcctcgcacgctcccactctctgtcgctgacttgctgacttggggtccctctgacaagtcagaagcggcctctaatcccccagaactctggtggccagtgtcccccggctccctgctggccccagcaggcaccccgcgggtctgtcccaccctccctgagtctgtggctccctgcgtctctgcctcacccgcgtgtctgctctctgggtgggagtggcgtgtgtccccggctccccgactctttctttcggaaattaagtgagtaactccgtgactccgtgctgatgccctaattgcctgtatgtgtgtttcggaggctgggtcccttctctccctctgtgcctccctccctggctcccactcttcccttccttgggtctctctccccgcctttcggcggcttcactctctgtccctcatttctctgtgtgcgtttggacaatccggtggccaggaggagaggagccccagggaggaggaggaggaggaaggtgggaaggcgaagtggaggctgcggaaaggcaggttagaaggcgaaggctgcggaagatgctacaggaagagggaggtgcggtcctggccgcggtccgggggtggggggcgggagttttcaggctcctggaccaggagggaagccggctccggctactcccagctgcctggagcccgagttcctgtctggcggctgcgcggccgggacttgggatgtgaggcgcatagcaatggggcgctgcggaggcgccactgcagctcccagctggagaggggggcggggagggggccgaggggcagccccgaggctcccttccccctcccccttcccagctgggctctccccaggggaattccccaccccgacagaaagtcaccagaggctgcggggagggggcagggaggaggggagggcgcctaggaggagagcagaggtgaggaggtctggggaaggagatgggggtgcagagaggaggcgaaggggtggaggggtgggcaagaggccatcctgggctctggagactcgagtcctggagagagactggctgggcccctggcaggacaggaccccagggaggcaggggcatagagatggggggaaccctgagagcccgggattgatggtgagttggaaggagaggctcccaaaaggagagagctaggattgggggggtctgagactggggagtactatggggtgaggagacaacgatggagggggtctctgggtgatgaaaggtcatagaaggatgtttcagagagtgatgggctaaggagaaggcgactgggggtgttggggagaaaggggagaggctggggtgcaaggcccaaagaggggcggggagggagtgggaggagggagctagaggagagggcggctgaagtgagggtctcctggacagaaggtctggagagggatatctgggggattgtcagagatgggggttagagaaggctgaggagcagatgccgtgtcttagaaggtcctagaagagcaggtgtgagggtcggaagcctggggaggaggcagcaaatggggggcgggggtctccaggaggagaggtttccaggaggggagggcggagggaggtgggagaggcagtggtcctggagagacacgtgcccaaggatagaaggccccaaagcctagtggggtcagggaacgggggtcttggagagacggaggggcaggggtccgagccgcccaccaggagaggcggggtgaccccagagggagaagggctgaagactggggagggggttgtctcactccccaatcaccccctccgtctttcccattttcacttcccaaactccccggttctccccggttgccacggcaaccgctcttgccaggcgcggtcaccaaggaaaccccgtgcccgcctctcccccctccccatcactggcgtgccccccccaccccaagcagcagcggtgtggagggtgggaggggccatggggagaggaagaacctggactcccgccccagaaaggggggcccggacctacgcccggagagccccccaccctaagcctacttcctcagccccacagctggatacgcagcgaccgccggacgcaccccccacaacctgtccccaggcagcggcgacaaccaccccccccacagcacagaactcgccctgcccggagaacccccacccagtcgcctcccccaccggcttctgcctcccattaggccccgccccctgtcctctgccatccccccccatcccggaggaggcctaagaccactgtcccccaattagcgaatgccccccacccaccccccgcggttccgcctccggcccccgcccccgacccgtgccccttggcggctactcacagcgaggagaggggttccttccggggggcagcatgcccggcccgtggggggaggacccccccaatgaggctcaggaatttggggtgcaaggcccgctgcggggaggcgcggggggcggggctgcggccgggcctggagcctctcgcgctctcccccctccccggctcctgggtggggagggggcttccgcagcggcggcggtggggctgggggggccgctctgcctcctcgcctcgcgcccgcctgccgtccggccccgcgccctcgcccgccgcccgccttccttcttgccttcctttctttccttctttctttcctggcttccttccttccagccttccttccttccttcctccctcctcgggcccgccggcgccgctctccccccaccccacccccccccaggccccggccccggccccggcccccgcctcggacggtgcggcagcgaccgagagcagccgagagcggcggagacgggagcggaatactgatgatggtgggagcgggcgggcggagggagggagcagggagggaggcccgggaggagaggaaggggggagagagggaggggagggagggcagcgtggagagggaggaaggaaagaggggggaagaaccggagaggatgggagagggagggaagaaaggagagggagacgggagggaaggggaagggggggaggaaagaagagggaaggggaggaaagaaggaaggaagtgggaagggggtggaagaaagaagagggggagaaaaaggggaggagcaggggagagaggagggaaaggggagagggtgtgggaggggaggggagaggagggggtaactcctgcaataaggtcctggatgaaggggaggggagggcggggggcagggggagtgggtagaggaagaggaaaggagggagaggaggagtggagggggagatgggtagagagatgggcaggagaggcccaggggcagggaagtgaggggaaagaggaggtagggaaggcctaactttgagggctgcaggggacagaggggcctggagggcggcgggggctgtggggagaagaatggggggtgcggtgtgcgttgtcaggaagagcaggggaagctggcaggacccggaagaggcaggaggatctaagtgggacagagatgagaggatggaagagggagggaaggacccgtcggggggaggggggaggagaaagatctcgggggagaggagagaagctggggagctggagctttgagggcccaagactgggtggcaagagcccggggagtagacagagtgggggaggggacagagggcctttcttgaactccgctgtatgcccgcttcgtccgcccctccacctcatgaagagaagaaccttcaaacccattttccagaagagaccactgagctcttggaggagccaggatggggtttgaatgcagtcttgggctgggggtaccctgagggagatggagaatgggtcagttcctagctttcgtccctggtccagacttggcaggtggaggcacctgggaggggcagagggcacagcctgcagcctccctactcactctcctctcacctcccccaggtgttggcagcgggtgctggggacgcatttagagctgtgaagctgagctgcatcttgggtgcagggagggggagggcagatgcagaggcctctgggaggtcaccgtgaccctcccctctacctccccggtccactaccccaaaagcttgggccccaaggaagggggacatcgggaatcaggggcggagaaacccagaaggaggggtggcccctgtccaggacactgaagatccttccagatgttaaaattagcacagaagtttcacccctgccttgttatcccccaaaacgctgactaataactgaggactcaggagagagagaagaaagatgaaggttccttctttcagtgccaggggacccgggacagactctccctcttccccttctcctcggagagccccagggagggaaagtgtggctgtacccctgcaggcagagcctggggagagtcagggttggaagctggaaggaaagtgggccagacacatctataatgagccagggttcccgagagaagccaggtcacagatgggttcggaagaggcggttttgggtgggcgctggtgggtgctgagccctgagagctgccgagaggggaaactgagaaggggctgggcgagggccagggagtggcaggtggctgtggtgcttcgggtttcacccgcccctggcgccgctcaagtctagttcgtgagactggaccagtgaatgtgtgtgtgcaccagggtccagcacagagtaggccaggaccgatggtgataccagcaaaacagaatcacatggtggcagcccgcggttcctcctggtctcccacaggccagatgctgtgcccagcacctcacaagcgtggcatcaatcctgcaaccatgcggtaccaactcctagggatggtggtacctggtgggcacaggtgagagcaggcccctgatgagccctgagttaaccctttcattacaagagggtctcggccgggcatggtggctcgcacctgtaatcccagcactttgtgaggccgaggcgggaggatcacttgaggtcgggagttcgagaccagcctggccaacatggtgaaaccccatctctactaaaaatacaaaaattagccaggcatggtggtgcgcgcctgtaatcccagctactcgggaggctgaggcacgagaatcacttgaactcgggaggcctccagaggttgcagtgagccgagatcacgttattgcactccagcctgggtgacagagcgaaactcagtctcaaaaaacaaaccaagagggtctcaggtgagaggccaagccgtgtcaggtggggccgttagagaagcagggaagtattccaatatttgaacaaccagcgaaccctcttggtccatgcagcctaagtctcagccctgcctggagggtatgactgcccctgttttactgaaggagaaatgatttgccgtcaacctccagagctcatcaagggtcttcagcaccgggcactgttcagggctttgagagcccggccggagaacagtaaggagacagcccctgtccccgtggaactgacccctcaaggtcctatttccaagagcagtgtgagcaatgaagaaaataagaggacaattagggaggagagaagttggtgggcggtcaggaggacagacttgaggtgatcaggggaggcctcctggaggaggtgtcttttgtggcgaggccaaaataaggagatagctcattgcgtgcacaggggcaagcacctggggcagaggcccccagatggcagcaagccgggcccgtttgagagatgggagccagataggtgtggcgtggaggaagaagagaagcagagtggaaaaagatgaggatgcggccccaggtttggctcaaacacaaaaccaaatcttaacgcttcccactgtcccctaaaccttgccctaaggcttaactctaatctcccactcaggtgactgtcctgagcaactggaacactgatcctcagttttgattcatgttgtcaacatggattggggactctgatgtcccagaaatggtattaggtaagagacagggacagtgaccctccacagtaatgagtgctcaaaggtattttcaccatttcaaaaaataaaaccaaaaaacaaaaacagacaaaaaaaaaatggaagttgtacatttccttcgggatgggatttcagaggttaaatttcaaatttctttgcttcaggctgtaaaaaaaattatccactcagtgtgttcactgcctgtctcaccccaatcagaagctatgatcggcagtttggtatacctttgataaataaaatatgggaaaatgaatgaacttttcacttaatgtagtttggtttgctcagaaaaatctctcaaagtgggactcatgggggacaatggctaaaggaatcacagccactcagatgttcctgttatttagttccacacagttgcactggacaactcccaggcacctttcacctgggctgtgatataacaagactgccacccatgataggaagctatgggaaggtggctcgcaccaccatgggtgctaagctgcttggccttatgccttaccccaattctccttttttattttttttgagacagggcctcgctctgtcacccaggctggagtgcagtggtgcgatgttggctcaccgcaacctccacctcccattctcgtgcctcagcctccgagtagctgggactacaggcgtgcacaaccatgcccggctaagttttgtatttttagtagagatgggggtttcaccatgtcggccagactggtcttgaactcctggcttcaggtgatcgcctgcctcagcctcccaaagttctgggtttacaggcatgagctgctgtacccaggcccttagccccaattctgaccatcactaactgctatgatctgaatatgttcccccaaaattcctatgttgaaacttaattgccaatgtgacagtattaacaggtgggtcctttatgaggtgattaagttgcaaggatagagccctcatgaatgccattagtgactttatttatttatttatttattggagatagtctcacgctgtcacccaggctggagtgcagtggcaagatctctgctcattgcaacctctgcctcccgggctcaagcagttctcgtgcctcaacctcccaagtagctgggactacttgcccctgctaccaagcccagcttttttttttgtattttagtagagatggggtttcaccacgttgcctagggtgtcttgaactcctgagctcaggtaatccacccatatcagcctcccaaagtgctatgattacaaccatgggccaccacgctcagctgcattagtggctttataacagaggtttggccaggcacagtggctcagacctgtaatcgcagcaatttgggaggccgaggtgggaggatcacttgagcccaagagtttgagagcagtctgggtaatacggcaaaacccataaaaaatacaaaaaattagccagtatagtggcatgtgcctgtagtcccagctactcaggaggctgagatgggaggatggcttgaacctgggagttgctggttccagtgagctgagatttcaccactgcactccagcctgggggacagagtgagatcctgtctcaaacaacaacaacaacaaaacaacaaaaaaacccagaagtttgagtgagctatattcccttttgctatgtgaagacacagcaagaaggcaccatctatgaggaacagctcttctccagacactgaatctgctggcgccttgatcttagaattcgcagccttcagaactgtgagagaaaattcccattgtttataaattacccaatctaggctgggcgtggttgttcacacctgtaatcccagcactttgggaggccgaggtgggcggatcacttgaggtcaggagttcaagaccggcctggctaacatggtgaaaccccatccatctctactaaaaatacaaaaattggctgggcatggtggcaggtgcctgtaatcctggctactcaggaggctgaggcaggagaactgcttgagcccaggaggtgtggaggttgcagtgagccaagattgtgccactgcactccggcctgggcaacagagcaaaactctgtctcaaaataaataaataaataaaattacccaatctaaggtatttttctgtagcagccccaatggacgaagacactgtgcctctattccaaaccctaaccctcactgttaggagagatgagtggccactgaaatagaagcacagagctgggtgctccatcctcacagcatggtaacatccctattgcccgcttgtctggtttccagaacgtctgtatttgtcctgagtcagtgtgacaggctacatttcctgaagatagctgtaatcatcgccccgtccctcaggctcttcttacgatgagactgacactttcccctgtctcatcccatcaaagtgctgattggcagtgaggtataccttgataaataaaagcccttgaaaccgggagggcttttgtgactttttcacccaatggcctgtggccgccaaaaagatgtagcttctgttttatttgctaaaatattaactccagcctttggcagctctatgagctgactgactgccccgaggtagttacgccgtgaggcggctcagactaacctgatatagttgggtatttttttatttttttttattttttgaggcggtgtctcactctgtcacccaggctggagtgcagtgatgcaatcatggcttaccacagccttgacccaaggggttcaagtgatcctcccacctaagcctcccaagtagctgggactataggtatgtgccaccacacatgcctaatttttaagctttttgtagagatggggtctcactatgttgcccaggccggtctcaaattcctgggctcaagctgtcctcctgccttggccactccaagtgctggcattacaggcatgagccacacctggccaagtttagatacttgtcccttccaaatctgatttagaaatgtgatccccagtgttggaggtggggcctggggggaggtgtctgggtcccagaggcagaccccctcatgaatgtcttggtgccattcctgcagcaatgaatgagttcttgctctattagttcactgaggtctagttgttaaaaagggcctggcgcctccctcctcactgtcttttttgctccttctctcaccatgtgacataccagcttcccctcgcctttcaccctcttctatgattgaaagcttcctggctgggtgcagtggttcacgcctgtaatcccagcactttgggaggcggaggtgggaggatcgcctgaggtcaggagctggagaccagcctggccaacatggcaaaatcccatctctactaaaaatacaaaaattagccaggcgtggtggcatgcaccggtagttccagctactcgggaggctgaggcaggagaattgcttgaacccaggaggtggaggttgcagtgagccaagatcgtgccactgcactccagcctggatgacagagcaagactccgtcttgggaaaaaacaaaaacaaaaacagagcatcacttacgacgttttcttgccaagagcatttaaagtaaatctaattaagccccaagacctatggttcccaaactagatgccaagacaccctggggggactacagcaaattcatagcaggccacagcagtgccatgcaggtaaacgtttaccagccggttctcaacattcgctagagaagagtcgtattttttttgcttctgtttgcaaagccaccattcgctggctccagcacacaactggttacagcatctttaaatttttcaagtgaaacacagtgatagttgacatctctcagacaccaccatgacctcatggcttgggacagtccacagtttcaacattagattatgctacatttgggggatgatattatctctgtaaagctgagtttttggcagttccatgattaaaagcaaccactacctgtttgtggaacaggaaaggagggtggtagtgtccaatctgattccaaagtgtgataggttgtacagtgcccaacaggtgcgtatacccttttagtaagtaatcagtgccctttaagactgaaataaaggccgggcacggtggctcatgcctataatcccagcactttgggaggccaaggggggcagatcatttgagaccaggagttcgagacaagcctggccaacatggcaaaacccgttggtgaaaccccgtctctactaaaaatacaaaaagtagccaggcgtggtggcgcacgcctgcagcctcagctactctggtgcctgaagcaggaggatcacttggaccccagaggcggaggttacagtgagccgagattgcaccactgcactccaggctgggtgacaaagcaagactctgtatcaattaaaaaaaaaaaaggatgaaatacaatattttttctttcaatttgtgtgcattactttttcaactggtgctaagttgctagaacataatacttcttaagttgtgtgaacataactgcttaataacggccaccacgtatttctttttgggtcagggacaccatgagaaaatgactgaggtgctgtgaactgagaatgtgggggatcctctgcacgagctctcttgtccatctacaggaattaggagagagaaacaagctggaagacactgcgaaggaacaatcaggcaaatctagaatgtggggcattctaggagacaaccagcctggtccctccaaaaagtccccatgatggggcagagaaactggctggagtggttgctctaagttaaaatagattaaggagatacaaccaccacatgcagtgcttgagccttgcttggatcctggtttgcaacatttcttttttctttttttttttttttgggagtgggggtctcacttttttgcttaagctggagtgcagtggcacaatcatagctcactgcagcctccaactcctgggcttaagtgagcctcctgccacagccttctgagtagcggggattacaggcaggtgccaccacacctggctaattttttgttgttgttgagatggagtctcgctctgttgcccaggctggagtgcagtggcatgatctcagctcactgcaacctccaccttccaggctcaatccattctcctgcctcagcctcccaagtagctgaaactgcaggcgcacaccactatgcctgggtaattttttttcttttgtatttttagtagagatgaggtttcaccatgttggtcaggctggtcccaaactcctgacctcaagtgatctgcccgcctcagcctcccaaagtgctgtgattacaagtggcagctactgcacctggctaatttttaaacctttttttttttttttagagatggggtcttgctatgttgcccaggctggtcttcaactcctggcctcacgtgatcctcctgccttggcctctcaaagcactaggattatagatgtgggccactgtgcccagcccatagtatgttttaaaagtcctaaaatacaatgtctggacaagtgggataatgtgaatttggactcgatcttagaagcactagggaattaagtttactcttcttgggtgtgatatgatataatattgtagttatgtaggagaatgttcttattcttttctttcttttttttttttttatttttgtttttgagacaaggtctcactctgttgcccaggccggagggcagtggcacagtcttggcttggtgtaacctctgcctcccaggttcaagccatcttctcttttcagcctcctgggtagctgggactacaggtgtgcaccaccatggctggctaatttttgtattttttgtagagtttcatcatgtttctctacattgcccaggctggtcttgaactcctggccacaagcgatctgcctgtctcagcctcccaaagtgctgggattacaggcatgagccaccacgtctggcctagaatgttcttatcttaggagattcgtatggaagcatttgcgtctgcaacctcttctcaaatcattcagcatctcaaatattaacaacgatggaatcaaagcggtgggcatatggatgctcaatgttttttcaactttctggatatatgacatttctcataaaaaatttgggggagattcatctgagagaagtcacatttagggcaggttgttgcttgcaattaaccactcccctcctgcataaacgcttttccctgtctgcaccagcatttaagatttccccagtatctcccatcttaaagaggaaccaccccatcatgccctcctctgacacgtctccctgcagtgaccgcccacttctcttgttcttctcagcaaaacttcacaaaagctacctctccttcttcatctcatagtccctctgcaaacaccagctgggcttctgcatcccacttccgaccaagctgtccttgtccaaggccaccaatggcctccgtactgcacactcaatggccacttctctacccgcatcccagtcttccacttggcagcactggccacagaacctcctggaaaccaatgtcttttcatggcttcagtgacttcaaaccctccctcactttcctcctctttcacctggctgagccttctgggacttgtctgccagttcccctcctttgcttgctccctaaatgtgggaggaaagccactggatcccagccctctttgtgctctgttctctacccctaggtgacccagttctgtggctttaaacccagacagccgggccgggcgtagtggctcaggcctgtaatcccagcactttgggaggcagaggcgggcagatcacttgaggccaggagttcgagaccagcctgaccaacatggtgaaaccctttctctaataacaatacaaaaattagccgggtgtggtggtgggcgcctgtaatctcagctactcgggaggctgaggcgggaggatcacgtgaacctgggaggcggaggttgcagtgagccaagatcgcaccactgcactccagcctgggtgacagagtgagaccctgtctcagaaaacgaaacaaaccaaacaaacaaaaaatccaggcagctgatgactccccagtatgggtgtccaactctgaactctgcgccgagctcctcctgcaggtatacaaatggctccttgacatctcttcttaaatgtagcggccaaagttgggctcctgactcccggcccctgcccacacacacttgctttgcttccagtcttccttatctcagtaaactgtaccatcctccactcagctgttgacttcaagacgtagaaattgttctcgatggcactcttttctcactccctctgtccagtccatcatccagtgactctacctttaaaatacatttccaagtatcccttcttttcatcccttctggcaccacggtagcaaaagccaccatcctctctcccatggccgactgaaggcctcctccctggccttactgctttttttaattgttgttgtttttgtttttttgagatggagtctcactctgtcgctcaggctggaatgcagtggcgtgatctcggctcactgcaacctccatctcctgggttcaagctattctcctgcctcagcctcccaagtagctgggattacaggcacctgccaccacgcccggctaacttttgtatttttagtagaggcggagtttcaccatattggtcaggctggtcttgaactcctgacctcaagtgacccacccatctcggcctcccaaagtgctgggattacaggcgtgagccaccatgcccagcctagccctattgcctttgctcttgcctccctacaatccattctccacacagcagccagggtgaaacttgctgaaaaacataatcagggccgggcgcagtggctcacacctgtaatcccagcactttgggaggccgaggcgggtggatcacgaggtcaggaggtggagaccatcttggctaacacagtgaaaccccgtctctactaaaaatacaaaaaaaggccgggcgcggtggttcacgtctgtaatccagcactttggaaggccgaggcaggcgcatcatgaggtcaggagatcaagatcatcctggctaacacggtgaaaccccatctctactaaaaatacaaaaaattagccgggcgtggtggtgggcgcctgtagtcccagctactcgggaggctgaggcaggagaatggcgtgaacctgggaggtggagcttgcagtgagccgaaattgtgccactgcactccagcctgggcgacagagcgagactccgtctcaaaaaaaaaaaacaaacaaaaaacaaaaaaaaaagtagctgggcgtggtggcgggcacctgtagtcccagctactcaggaggccgaggcaggagaatggcgtgaccctgggaggtggagcttgcagtgagccaagattgcaccactgcactccagccggggcaatagagcaagactccatctcaaaaaaaaaaaaaaaaaagaaaaacgaaatcagatcacattaacctccaacttaaaatactcggaggacttctcactgcatttgggattcattcctccttcccatgactgctaaagtcctgagcggtctgggccttgatgctgccccaccctcacctcccacctctccccactccagcttctccaggacagtgtgctcattcctaccacagggccttggcacctgttcctctctgccggaacgctcttctcccacatcgtcacatgctggcttccgattttcaggtttcagttcaaatatcacctcagaggggccttccttgtcctgctgatttagagacactctcctacctgttcttggtaactctttgcaacacaattgtgttctgttttcttcacagctctcattgataactgaaattttcctcttttcttttgcttccttccttcctttctctctctctttctctcttttttctctttcttttctttctctttttctttctttctctctctctttctttctttctttctttcttcctttctctctttctttctttcttttttgagacagtctccctctcttgcccaggctgaagtgtggtggcgccatctcggctccctgcaacctctgcctcccagcttcaagcaattcttgtgcctcagcctcctgagtacctgggattataggcgtgtaccaccacgccaggctaatttttgtatttttagtagagaaggggttttgtcatgttggccaggctggtctcgaactcctgacctcaagtgatctgccctccttggcctcccagaatgctgtgattacaggcatgagccacggcgcccaggctgaaattttcttcgcttctttcctttctactcactgtcttccctcacttgaaggcaaactccatgagaacaaggacctggtctattttcagtgatgactacattcccagtgtctggaaaatgccaggagaactgagtattttcatggaatttgtggaattttacatacaatccatgcaggcttctctgcactttaaatacctttcctgaaacagaatcatccttccccataacaaaacattaattgttcttgttggtctgccatgcatgagataagtgcttggattacctctgaccccaccaacaatcctgcaaggaaggtgctattaatatcctcctctccactttacagagaagactcaagtgcaaagagctgaggtgcttacacaagaccaccgcacaggaacgaagcgtcggagtgtggaatcgagacctgttctactgcactccagagcacatgttctttctactctgccataatgtttgggacaaaattgaatcatgagggtttttttcttccattacaaatgtaacacatcgctcctgcgtacggctgggatgagtcactggcaccagacgtgccctcctgcaaaaaacagctatgaaactggacaaaatacaggagggccactgttttcaggcgttgaacagtggaaagaggactgcgatccttgagaagagacgatggtgaaggtgagcccatgtgttggcccaggttcctcactgggagccctgtccctaccacagcacagagatacggggctaaaacaatgcagttgtttttttgtgttttctcttctcttctttctattatctttttttttttttgagaccaagtctcgctgttacccaggctggagtgcaatggtgtgatctcagctaaatgcaacctccacctcctgggttcaagcggttctcctgcctcagcctgtcaagtagctgggattatagactcgtgccatcatgcctgggtaatttttttttttaatttttttagtatttattgatcattcttgggtgtttctcggagagagggatgtggcagggtcatacgataatagtggagagaaggtcagcagataaacacgtgaacaaaggtctctggttttcctaggcagaggaccctgcggccttccgcagtgtttgtgtccctgggtacttgagattagggagtggtgatgactcttaacgagcatgctgccttcaagcatctgtttaacaaagcacatcttgcaccgcccttaatccatttaaccctgagtggacacagcacatgtttcagagagcacggggttgggggaaaggttatagattaacagcatgccaaggcagaagaatttttcttagtatagaacaaaatggagtctcctatgtctacttctttctacacagacacagtaacaatctgatctctctttcttttccccacatttcccccttttctttttgacaaaaccgccatcgtcatcatggcccgttctcaatgagctgttggggacacctgcagaaaggctgtcacttcacacttggaagattgcacagcggccaggcagaggcactcctcacttcccagacagggtggcggccgggcagaggggctcctcacttcctagacggggtggccgggcagaggcgctcctcacttcacgcctggataatttttgtatttttagtagagacggggttttgctgtgttgccaaaactggtcttgaactcctggcctcaagggatctgcccgtctcagcttccgaaagtgttgggattacaggcgtgagccaccgtgcctggcccagagcagtcttactgagccgaggagacagagagagggctctgggggctgctgacaaggctggaatttgcaggatagggcagtggggaaaagggagccgcatgaggtgggcccccagaagcctgtgtgtagttcaccataggtccttggctaaggactggacggtgtctgcagaggacaagactccatgagtaccagtcgggggtagctgctacaaagatgagagatgaacagaaataaaagccgtcatgcagcgctaggagatgagtctccagcccagccagagtgggagggcctcactaagctcctgggcactcagctgaaagctcaggaaggccatgctttaggagtaaggccctgacttaatattctgttgagtggatacagcatggttaatttaaccattcctttctagttggatactctggtaattttatttttcaaaaactaggcctggcatggtggctcatgcctataaccccagaactctgggaggctgaggtgggtggatctgttgagctcaggagtttgaggccagcctggctaacatggtaaaaccccgtctccactaaaaatacaaaaattagccaggtttggtggtgcgtgcctatagtcccagctacttgggaagctgaagtaggagaatcgcttaaacccgggaggtggaggttgcagtgagccgagatggtaccactgcacccatccagcctgggtgacagagcaagactctgttcaaaaaagaagtaaaaataaaaaataaaaataaaggccaggcacagtggctcacacctgtaatcccagcactttgggaggctaagatgggcggatcacctgaggtcaggaggtcgagaccagcctggataagatggcgaaaccctgtctctactaaaaatacaaaaattagctgagcatggtggcacgcgcctgtagtcccagcttctcaggaggctgaggcaggagaatcgcttgaaactgagaggccgaggttgcagtgagccgagatcacgccactgcactccagcctgggtgagaagagcaagactccatctcaaaaaaaaaaaaaaactattataaaatatcaccatgaacctctttgtaagcttctgactttcaggtgaattcccaggcatgggatattttcagggtatggacattgttcctgtatttgacacctttcaccaatttgctttccaaaattgtggcaatttaccttctgacaactgagtatcagcatgcatgtctgtttggctgcactctctctagcatttggtagaagcttaaaacatttgttgctcatttgatgggcagaggaaggaatcactgagctgttgtaatgctatgcctttgggctttataaaaggaactaaatgaaacagttaatgtgaaaattgctttagcttctgcagaaaacttttgttaatgacccagcaattcaactcataggaacttatattcaggaagtcatcagagaggtagacaaaaatatacacacagagatgtatctcatagaatcatttattatagccaaatctgaaaaaaacttaagtgttaatggagtacatgtgatctggggatgctgctttacctgtagcctgttttcatttcactcctaagttatttatttattttatttatttttatttttattttttatttttagagacagagcctcgctctgttgcccaggctggagtgcagtggcacaatctcagctcattgcaacctttgcctcccaggttcaagcgattctcctgcctcagcctccagagtagctgggactacaggccggtaccaccatgcccggctaatttgtgtatttttagtagagatggggtttcaccacgttggccagactcgtctcaaactcctgacctcagatgatctgcctgactcagcctcccaaagtgctgggattacaggcgtgagcttctgtgcccggccctgccatattattattattattattttgagacagagtcttgctctgtcacccaggctggagtgcagtggcacaatctcagctcactgcaatttccacctcctgagttcaagaaatcctcccacctcagcctcctgagtagctgggactacaggcgcctgccaccacgcccagcttatttttgtatttttttgtagagatggggttttgtcatgtttgccctggctggtctcaaactcttgggctcaagccccctgggctcaagtgatccagccgccttggcctcccaaagtgctgggattataggcataagccaccatttctggccactcctgccttattgactaataattttattattattattattgttattgagacagagtctctgtcacccaggctggagtgcagcggtgcaatcttagctcactccaacctccacctccttggttcaagtgattctcttgccttcgtctcccaagtagctgggattacaggtgcccaccaccatacccagctaatttttgtatttatggggtttcaccatgttgcccaggctggtctcgaactcctgggctcaaatgatctgccctcctcagcctcccaaaatgctgggattacaggcgtgggcaaccacacccagccactcctgacttattgactaataattttattatttttatttttttgagacagagtaacctataattttagcacttgggaaggccagggtgggaggatagcttgagcccaggagtttgagaccagcctgggaaacatagggagacccccgtctctgcaaagaatcagaaaaattagccaggcgtggtgatacgtgcctgctcaggaggctgaggtggaggatctcttatcggtgacaggctcttccacctggtactttccctctacttcgtgctgcgttttggctgacaatagccttaagggagaggaaatcaatatatattccccccataggactggcaaaaccaaagttaactggtgtagtaagcattgatgagatgggctgggccagtggctcactcctgtaatcccagcactttgggaggccaacacaggcggatcacttgaggtcaggagttccagaccagcctggccaacatggtgaaatcccgtctctactaaaaatacaataattagctgggcatagtggcaagcgcctgtaatcccagctacttgggaggctgaggcaggacaaccgcttgaatccaggaggcggaggttgtggcgagctgagatcgcacagctgcactccagcctgggcaacagagagaggctcagcttaaaaaaaaaagcactgatgaggatgtgggggaacaggtcctctgtcccattaccagcagaaagaaaatcaggctgggctcagtggctcatgcctgtaatcccagaactttgggaggctgaggcgggtggatcacctgaggtcaggagttggagaccagcctggtcaacatggtgaaaccccgtctctactaaaaataccaaattagctgggtgtgatggcgggcacctgtaatcccagcaactcgggaggctgaagcataaggagcagctgaacccgggaggcggaggctgcagtgagccaagatcgcgcctttgcactccagcctgggtgacagagcgataccctgtcacaaacacacacacaaaaagtgaaaatcagtatgtctaccaatggttccacacccttgccacggcctcatcgtgtatgtggggtgcttccttgccctttaactctgcacagttgacttgacttgacttgctttggccaatggcatgtgggtggatgcaccagcgtctgagtctaggctttcagaagccttgcatctgcctctagtccgcttgtgccccagccgtcaccacgagacgctctccctggcagcctaccttctctcaacctgggccccagaatgagatgcttggagcggacctgagccagccagacctgcagcttcaagcagagcagccctagaaaagtctggctaggccgggtgcagtggctcacgcctgtaatcccagcactttgggaggccaaggcaggtgaatcacttgaggtcaggagttcaaaaccagcctggcgaacatatagtgaaaccctgtctctactaaaaatacaaaaattagccaggcgtggtggtgcattcctgtagtcccagctacttgggaagctgaggcaggagaatcacttgaacccgggaggcggaggttgcagtgagccgaggttgtgccattgcactccagcgtgggcgacagagagagactgtctcaaaacaaaacaaaacaaaaaacaaataaacaaaaaagcagaaaagcctggctagatcaagaacacatgaagttgctgagtttttggtatttgttatgtagaaatacttgacagttccaggaattgtttattaaaattaaaatgaatacattcatataacttgataattctaactctccttattagacatgtctccaaggaaactcatgtaaagatgttcatagcaacattgtttgtaaaagcaaagaaaccaagaataacccaaatgtccagcaagaggagagcggacaaagaaacgccgagttctatggaatactactgcagcttttaaaaggaagaggacaagctctttaaataaatctggatagatttccaagacatattgttgagttaaaaaagcaagctgcagaacaatatgtacagtaggatcccatttatgttaaaagacactcatatgcttgctcaaaacaatactactcatttactatacaatactatgcatatactctattaccacacacgcacacacatgcacacacatgcatgcacacacacacatgcagcatgcactcacttttagacaaagatccagaaggatcaaccataaaccaataatcatggttacttccagagaagagatgtagatgagagagaggtgaccaaagggaattttagctttgcctgtaagctttttttaagaagcaaggaaagtctatctgtatattatttgtacaatttaaaagtaattttccttttctttttttttttttttttgagatagggtcttgctctgtcacccagactggagtgctgtggcatgatcatggctcactgcagcttcaaactcctgggctcaagtgatcctcccatctcggactcctcggtagctgggactacaggtgagcgccaccatgcccagctaatttttgcttttttttttctgtagagatggggtcttgccatgttgtccatgtcggtcttgaactcctgggctcaagtgatcctcccacctcggcctcccaaagtgctgggattacaggtgtgagccgctgcgcccagcctaaaaataattttgtaaaaggaagaaatatatatgaatatatacatccatgcatactatgaatataaacatagggccttattttaaatgtcctttgtggcagacaggcctgaattcaaatcctgctactgccaccagctaactgtgtcactagacaagtccattctttcacttggaacctctgtttcctcatatgtaaaaacggggatactcatttatatttaatagggttgtcatcaaagtaaattataatgtttgtaaagttccaagagcaggctgggcatggtggctcacgcctgtaatcccagcactttgggaggctgaggtgagtggatcacctgaggtcaggagttcgagaccagcctgggcaacatggcaaaaccctgtctctactaaaaatataaaaattagccgggtatggtggcaggcgcctgtaatcccagctactctggaggctgaggcaggagaatcacttgaaacccggaggcggaggttgcagtgagccgagatcgcatcactgtactccagtctgggtgacagagtgagactctgtctcaacaaaaaaaaaaaaaaaaaaaaaaaaaaaaaaaaagttccaagagcagtgtctgacaaccagtgtatgttcaattaaatacgaattctttcccttccacttcccagtccctgctacccctaaccttgctcctaagccatgagtcatgctgtggtgactattttgtaggtgcctccttagcacttacattccctagggtaggcggaataattactccccaaagatgtcctcatccccagaacccgtgaatatgtttgattacatagcaaagaggaagtaaggcagctggcggaattaaggttgctaatcagctgacgttaagatagggaaagtaggccgggcgcggtggctcacgtctgtaatcccaccacttcggaaggccgaggcgggcagatcacaaggtcaggagatcaagaccatcctggctaacatggtgaaaccccgtctctactaaaaacacaaaaaattagccggacgtggtggcacacacctgtagtcccagctactcgggaggctgaggcaggagaatcgctcccagaacccgggaggcggaggttgcagtgagccgagatatgctgctgcactccagcctgggtgacagagcaagattccatctaaaaaaaaaaaaaaaaaaacgttagggaaagtatcctggagtacatagacatgctctatgcagtaagaatccttccaagtggaagagggaggccagaaggaaagaatcagaaaaacatgtgggacaatggaagcagggttagaaaaatgctacactgctgactttgaaaatggaaggtgctatcagccgaggcagcctttagaagctggaaaggacaattaaacagattttcccctagagcctccagaagaaatgcagtcctgctgccatcttgattttagcccagtgagacccatgttggacttctgaactacggaactgttaagataatgaatttgcactagatggcggggctcgttggctcacgcctgtaatcccagcactttgggaggctgaggtgggcggatctcctgaggtcaggagttcaagaccagcctggccaacatggtgaaaccccttctgtattaaaaacagaaaaattagccaggcatggtggtgggtgcctgtaatcccagctacttgggaggttgaggcaggagaattgcttgaacccgggaggcagaggttgcaatgagctgagattgggccattttactccagcctgggtgagaagagtgacactctgtctcaaaaaaaaaaaaaattgcattgctacggtagcaacaaaaaacaatgcaactttgtgtgtgtgtgtgtgtgtgtgtgtgtgtgtgtgtgtgtgagagagagagagagagagagagacagggtctcaactctgtcacccaggctggggtgcagtggtgccatctcagctcactgaaacctctgcctcgctggctcaagcaatcctcccacctcagcctcccgagtaactaggaccacagacatacacactaatacgcccagctaatttttgcattttttgtagagatggggttttgccatgttgcccaagctggtccgaaactcctgggctcaaatatccacccacctcagcctcccaaagtgctgggattacaggtgtgaccaccacacccagcccaatgcaacctttgattcctacaaaggcatctctatttttggtggcagaaacacctttctctccaaatagcccatgtgtccttcctggacatatctctttggatacactgggtcctctcagcttcagacagaggactcaggcttggttaatcagagaatttacaatctctggccatactgactggttcatggatggtcatgtgagcaaaactgggccaaagcagagaattaagccaaagttgctaagggggttggatgtgagcctgataatactgatggtcatatttccagcatgagggaacagcttatgtgaagcgaagccagtcagagggaatgaggactcagagatgcagaggcacattccccacgacatcgtttgagtgcttggatctagtcctgcctgaagttctaggctagccatgacttttcagctacatgagccaatacattcaataaatctcccacaattttttttttttttgagacagaatctcactctatcacccaggttggagtgcagtggcacgatctgagctcactgcaacctctgcctctgaggttcaagcgattctcctgcctcagcctccagagtagctgggactgcaggcacgcaccaccactcctggctatttttttgcatttttagtagagacagggtctcaccatgttggtcaggctggtctcgaactcctgacctccaacgatctgccgacctcggcctcccaaattgctgggattacaggtgtgagccaccatgcccggccatgaacctccttcttaaaattcagccaatttgaattggggtctgtcttttgcaagtggactaatcctttgagaatctgatgacagctataaattttttttccttgagaaaaacgcatgtggacaaacctttatatacaatttcagggaaacttttgacccctgaagtcaggccccagcttatgaagtcctgctgtgttccaggctgtatcgccagcaaggcatcaaaaaggagagaagagacagagtatcttcagggagcccaggatgcccagtccttctctccaatcctgaagaggagttttgatataggtcataaaccactggatcaaggaatgaaaggtgggagttctccgcgggaggcataaaaaggctctttgcgatcactgcactcagcctctttgagagaatctctcagccctacttttggaatctactgattccaatctacttttggaatctaagagcctctcttggatctctttcctggattatgattatatttctctttcccctctttccacacttggaagaacccaagatcagagtgacacagtacgtgcccaagatacacagcaaagatatgaagcgggttttgaattctggcctcgttagctcttttacacatagaaggtctttctttttctttcttttcttttcttttttctctctttcttttttttttttttgaggttaacagtggaggtttaataggttaaagagaaaagctctctctcctgcagagagggaggggctcccaagtgggtcatctggttccctggtgaaatgaactgggttttataggtgagcttgggtaggtggagtgtgatttacatagaggatgagagattggtgggaccaggtatgccatttgcatagcgtgccgagggaatcttttattatgcagatgggctctctacctggccagcaccatgttgcctgctctttttttttttttttttttttttgagatggagtctcgctttgtcgccaggctggagtgcagtggccccacctcggctcactgcaacctccacctcccgggttgaagcgattcccctgcctcagcctccccagtagctgggattacaggtatgcaccaccacacccggctaattttttgtattttggtagagacggggtttcaccatgttggccaggatggtctagatatcctgacctcatgatccacccgcctcggcctcccaaagtggtggggttacaggcgtgagccactgcgcccgacctacctgcttctttactgcacacgtggtcgacaaagaaaaggaaagatggagcctccatgttgaacatgcctggtccccaggtagctttttcctgttggcacagctgcctgcattcacctgagcaagctcctagcttgctttttatagagagtgtttcaatggcttccctcccctcttagaatacaaaagcaggatctcactgtggccaccgggccttataagatttgtcacttgtctctctgccctcgtttggagtccctctcaccgtcattcattaggctccttccagccatgttggttttctgtctgtccctcaaatgtgccaaacatgctcctttgtccctgctcctccctgtgcctacagccgatgctggataacctaagatgcagaccacaaacatgctcaagaaaccagcaaagtgtgggctcgcccaaattctttcttgaaaaaagtttcatattgtaaagaagtcatcatgggaaaaaacaaaatgtagattccttttttggcctatcatactctcgttgtcagattttggtattaaagttaggccagctggatcttccggctggttgctcctcctcctcctcctccttctttcttcttttccttcccccttccttcctgccttccttctttccttccttcctccctccctccctcccttcttccttccctcccttccttccttccctcccttcttcctcccttcactcttccctcccttccttccttctttccttccttccttccctccttcctcccttctctcttccctccctcccttccttctttccttccttccttctttcctctctctttccctccctccctccctccctccctccctccttcccttccttcctcccttccttccttccttccttcctcctttcttattcctttcttcaagacagagtctcgctctgtcgcctaggctggagtgcagtggtgcaatctcggcccgctgcaacctctgcctcccgcaatcaagcgattcttgtgcgtcatccagcatagctggaatcacaggcaggcgctactgtgcctggctaatttttgtattttgagtagagacagggttttgccatgttggccaggctggtcttgaactcctgccctcaagtgatcttcctacctcccaaagtgctggattacaggtgtgaaccactgtgcctggcctggaattatttcctctttaaatgtttagcaacatttagtgccagtgacactgtatggacccagaattttctttgcggttaatcttttaaaaattactgatttgatttgtttcatggttttggactaactgaatgctatattttatcttgagtcatttttggtaagttatagctttccaggaatttgtccatttcagctatattttaaaatttgttagcgtaaagttgttcttaataaagttccctcttaaaaattcctgatattggctatttgtgcttttttctttctctttttaatcactatcactggaggtttgactatcttactaggcttttcaagtaaccaactttggtgtagttgattatcctaactctatgtttgttttctatatgacttttttcatttttattattttttccatttccttatttttttggatttttttagttattctttttctaactccttgagatgaatgtatttagtgccatgaatttcccttgaagttctgctttatgcattcacgtttaaaaatatatagtttttttttttaccatacagttaaaagtgttttacagcttccattaggatttcttcattgacccaggagttatttaaaagaacattttttaatttgtgagaattttttttttttttttgatgaggtcacactctatcacccaggctggagtacagtggccagatctctgttcactgcaacctctgcctccccggactcaaatgatcctcccacctcaaccttctgagtagctgggactacaggcatgtgctaccaggcctggctaattctgaatttttttttgtagagacagggtctccccatgttgcccaggttgatctaaaggtcctgagttcaagtgaccctcccgcctcagccttccaaagtgctggaattacaggcgtgaaccaccacacccaggacatgagatttttatttattactattattattaatttttttttttttttgagacggagtttggctcttgttgcccaagctggagtgcaatggcacaatctcggctcaccgcaacctctgcctcctgggttcaagcaattctcctgcctcagcctcctgagtatctgggattgcaggcatgccccaccacgcccggctaattttgtatttttagtagagatggggtttctccatgttggtcaggctagtctcgaactcctgacctcaggtcatctgcccgcctctgcctcccaaagtgctgggattacaggcatgaaccaccacacccaggatatgagaatttttaaagttatctttttttttttttttttgaggcagagtctcgctctgtcatccaggctggagtgcaatggtgatctcagctcactgcaacatccgcctccccagcttaagcaattctcctgcctcagcctctagggtagctgggattacaggcgcctgccactaagcccggctaatttttagtatttttagtggaaatggggttttgccatgttggtcaggctagtcttaaattcctgacctcagatgatccatctgtcttggcctcacaaagtgctgggattacagatgtgagccaccgcgcccagcctaaagttatcttttttttttttttttttttagagacagacttttgctctgtcgcccaggctagagtgcagtggtgcgatctctgctcactgcaagctctgcctccccggttcacgccattctcctgccttagcctccggagtagctgggactacaggcgcccgccaccacattagccaggatggtctcgatctcctgacctcgtgatccacccacctcagcatccacccacctcggcctcccaaagtgctgggattataggcatgagccatcgcgcccggccaacttatctttttattattaacttataacaacctacctatggtaatgaccatatttattctgtatgatgtcatgtcaaacatttgaaatgtgttacggcgtgtatatctcattttattgctccttgctttattgcactttgcagatttttctttctacaaattgaagttctgctgtgttgagtctgtctatcagcaccattttaacaacagcgtgtgctcccttaatgtctctgtgtcacattttggtaattctcccaatatttcaaactttttctttatcattctgttatggtgatctgtgatcaatgatttttttttgagatgcagtctcactctgtcgcctaggctggagtacggcggtgcgatcttggctcactgctgctccgcctcccgggtccaagtgattctcccgcctcagcctcttgagtagctgggtttacaggcgtgcaccaccatgctcagctaatttttgtatttttagtagagacggggtttcaccatgttggtcaggctggtctcgacctcctgacctcgtgatctgcctgccttggcctccggaagtgctgggattacaggcgtgagccactgtgcccgggtgatcggtgatctttgatgttgctattgtaattgttttgggatgccatgaaccacatccatatcagatggtgaacttcatccataaatgttgtgcgtgttgtggcttttataccaactggcctttcccttgtccttctccctctccctgggcctcctcatttcctgagacacaacagtattaaaattaggccaattgataactctacagtggactctaagcatttaagtgaaaggaagagtcacatgtctttcactttaaatcaaaagctaaaaatgattaagttcagtgaggaaggcacgttagaagcttagacaggccaaaggcaaggcctcttgcctttagccaaggtggaaatgcaaaggaaaagttcttgaaggacatgaaaagtgttattccagtgaatggctaatcataagaaagccaaacagccttattgctgatatgaagaaagttttcgtggtctggatagaagatcaaaccagccacagttttcccctaagccaaagcctaatccagagcaaggccttaactctcttcaattctacgaaggctaagagaggtaaggaagccacagaagaaaagttggaagctagcaaaggttggttcacgaggtttaaggaaagaagctatctccgtgatatagaagtgcaaggtgaggccaggcgcggtggctcatgcctgtaatcctaggactttgggaggccaaggtgggtcgatcacgaggtcaggagtttgagaccagcctggccaacatggtgaaacactgtctctactaagaatacaaaaattagctgggcgtggtggcatgcacctgtaatcccagctacttgggaggctgaggcaggagaattacttgaacccaggaggcagagattgcagtgaactgagatcacaccactgcactccagcctgggtgacggagtgagactctgtctcggaaaaaaaaaagaaaaaaagaaaaagaagtgcaaggtgaagcaccaagtgctgatggagaagctgcagcaagttatccagaaggcctggctaagataattgatgaaggcagctatactaaacaacagattttcaatgtaaatgaaacagcctacagccttctatgaaaagaacatgccatctagggcttttatagctagagaggaaaattcaatatttggcttcaaagttccaaaggacaggttgactctcattttaggggttcatgcagctgatgactttaatcgaagccagtgctcctttgccattctgaaaattctaaggcccttaagaattttgcagaatctactaggcctgtgctcaaggaatagaacaacaaaacctgaatacaacacatctgtttacttcatggcttactgaatattttaagcccattgttgacatctgctcagaaaaaaatattgtttctttccaaatattactgctcattaacaatatatctggtcagccaagagccctgatggagagatacaagattagtgtcggctgggtgtggtggctcacacctgcaatcccagcactttgggaggcggaggtgggcggatcacgaggtcaggagttcaagaccagcctggccaacatggtgaaaccatctctactaaagatacaacaaattagctgggcatggtggcacgcacctgtaatcccagctactcaggaggatgaggcaggagaatcgcttgagcctgggaggtggaggttgcagtgagctgagatcctgccgctgcactccagcctgggtgacagggtgagactccatctcaaaaaaaaaaaaaaagaaaagaaaagaaaattagtgtaattttcatgcctgctaacacatccattttatagcccatggatcaagaagtaattttaattttcaggtcttattatttcagcaatacacttcataagggcatggctgccatagatagtgattcctctgatggatctcgtcaaagcccattggaaaccttctggaaaggattcaccattctagatgccattaagaacatttgtgattcatgggagggggtccaaaatcaacgttaacaggagtttggaagaagttgattccagctgtcatgatgactttgagagaagttcaagacctcagtggaagaagtcacagcagatgtggtggaaatagcaagggaactggaatttgaagtagaacctgaagattctactactgaattgactgaattgtggcaatctcataataaaatttgtacacatgaggagttgctccttatggatgaggaaagaaagtggtttctttttttttttttctctaagatggagtcttgctctgtcacccaggctggagtgcagtggtgtgatcttggctcactacaacttctgcctcccaggttcaatcgattctcttgcctcagcctcctgactagctgggattacaggagcacaccaccctgctaatttttgtatttttagtagagaaggggtttcaccaggttggtcaggcaggtgtcgaactcctgacctcgtgatctgcctgcctcggcctcccaaagtgctggggttacagacatgagccactgtgccggccaagaaagtggtttcttgagatggagtctactcccggtaaagatgctgtgaacattgttgaaatgacaaacaaaagatttagaatattacataaacttagttgataaagcaatggcatggtttgagaggactgactccaattttaaaacaaattctactgtgggtaaaatgctatcaaacagcatgcatacgtatctatgtttgtatagaacaattggaacatgtcgacatcattcttgaaatatattttcactggctgggcatggtgactcatgcctgtaattctaggattttgggaggccgaggctggtgcatcgcttgagctcaggagttgaagaccagcctggccaacatggtgaaaacctgtctctactaaaaatacaaaaattagctgggtgtggtggcgcgtgcctgtagtcccagctactcaggaggctgaggcaggagaactgcttgaacccgggaggcagaggttgcagtgagctgggatcatgccattgcacttcagcctgggtgacagagtaagactccatctctctctctctctctctctatattatatattataatattatatatattatatattatattatatattttatatataatataatatatataatatataaaatatataatatatattttatatattatatgtattttactggatattaaatatatatattatatatatattttactggatattaaattgacagttattttctatcagcacgttgatcttattctagattccattgttactgatgtaacaatgtcagttgttatgcaaattatttatttttttaaaagccagtccaatttagcagtaagaggttgtataacaactcgcagtgaatttcttttttaagacaaggtctcactctattgccaaggctaggatgcagtggtgcagtcatggctcactgcagccgcaacctcttgggctcaaatgattctcctgcctcagcctcctaagtgagtagctgggactacaggctgtgccaccatgcctggctaagtttttaaaaaaatttttgtagagacagtcttgctatgttgcctaggctggtctcaaactcctggccttaagcaatcctcctgccacagaggcttcccagagtgctgggataactgatgtgagacaccacacctggccctccaactattgatcttttaaaggacatctgtcttttttctctagctgctgatgagatctctttgcctttagtgttctgcaaacatactgccgcgggtgcgactgctggggccggtgtcgcggtcattaaaggaatttaccgagacagtcatagctaaagaaaagcagatttattggagaaagtatgaagatacattgcaaggttgcaatgggctgcacagcaaagaagcggctgtttgcaaagaggcaggggctagagggatgagtttatgctgctgaggttacatgcggagtgaggtatttgggagcaggatgttgtgccagcctgttgtctgtgattagtcatctctcagaacaattgttttccccaacctgggaccccttcctttttgcttacttattttgtcaggactccacgcatattaatacaatgatgtttctaagtgtagatttctttatacttatgattcattaggcttcttgaatctttgaattagattctctcctcaattttggaaaatttgaaaaatccgccattattttcttaaatattctttctgccatattctctttatcccctcttttgggactcagaatatagataagactctctgtcttatctacactccatgccacttaacctcttttacatgtttcctgctttgtctcttatggtgaattgtggataacttctgttgatctatgttccaattcactatgtctctactcagctgttgcttttacttttaatcctcttttagagtttttgtcattttcaaagtacctagataattttttatagtttctcggtcccttgccattgcaaaacaatggcaatcttatattttatatgaacaaaccacactgttttatgtccctctgatagttctaaaatcacaaggattagtgggtctgtttacagtgtctcttatttctgctagttcttgctcctggtactttgtgttcttggttatacctgcgtgctgctcacgttccttgggaaaaaaaaaatatgtttacaggagtaatttgaggcctttaatgaagattattttcaccagagagaattatctgtgtgttgtcatcaagagtttaaaaatacttccacttggggactttaagtccacaacttgaggtcttttggaccacccatggaataggctgccaagtaacaaaccagggccaatttacttctagttcccccttaccctgagggcatagccattgctttctcagctcaatgtggactccccaccttgcttgggccctagcttttttttgttttccttccatctaagaagccatccaaataaaagtttaaatttgccagggttataaaattcccttagggtagaagtactctgattacttctctgagttcccaattttccatcagttacagcctgataaatcctgtgagccttcggtggtttttttttaagttacagaaattcttttagagatagggtcttgctatattacccatgctggaatgcagtggctattcacgagcatattcattgtgcactacagcctcaaactcctggcctcaaggggtcctcctgcctcagcctcctaggtagctgggactacaagtacaggccactgtgccaggccaatgccttcaagatttaaaaaaacgcatccagcatttttagttgcttttagtgggaatgttggtctgaataacctagcctgccattatcagcaacctcaattactctgtcctctcatctttgcttaatttctcttcttagcatttaacactacttgacattatatatttatttgtccaccaactaggctgaaagctgcgtgggtgcatgtactttgtttgctgctgtcgtctccctggcacccacaataatgcctggaaaatagtgaatactcaatagttgttgaatgaatgaatgaaaaaagaatgattttgcttagtgctttgtgccatggctactgtgggccaaagaaagaggactgggggattcagtgtcaagatctttcaaatcacaattccaaatcaaggtcacaacttaaccaaactggcagaaggaacctcaagtgttcttggctttcagtacttcccaggtttaggtactgagctgagtggcaggtctcagctaccgacgggtttgtgggttcccgtcactctctctgggtctttgctcagttcgcctatctttgcttttgtctgttgtcgtcaccctttaccaagtctcagacagctctgaccctctcatttcctttctttgccctttctctctattcatctctgtgactcagtctctgtgtccttatctttctctagtgggtcttgatcatgtacttcccgtcactctcctcccccataagatacaattctaatggtttctgactttgcccgcacccctaatctctagctgcaggatgtctgacaagccatcttccatctacccccgcgtcttgcctcatgacttttctctatcaccccctttttatgttaccatcccttctgtctgacgtcacgctctctgcctttatatcttcaccactctctctcattgaatgaactctgttatgttcatcctggtagtgtcaccacaactgccctccactcagagtctgtgcattctgttgccattccccctggctctgtctcctctcactctgaatcctccatctctgtcccttgcttggcttctgtctcctctatttctgttggagcctctttctctgagttctaccttctatctccgtctctgtcccgtcagcttctgttccacttctctctttgctattctcttttcttttctttctttttgacagagtctcactctgttgcccagacgaggctggagtgcagtggtgcgaacaccacgcactgcagcctccaactctcaggctctagtgatcctcccacctcagcctcccaggtagctaggaccacagatgtgtgtcactatcaccatgcctggctaattttaaacatttttgtagggacacggtctccttttgttgcccaggttggaggacagtggcatcaacatagctcactgcagccttgacctccctggcccaagtgatcctcctgcctcagcctcccaaatggctgagaccacaggcgcacaacaccatgcccagtgaacttttatatgtttttttgtagagacaggcttttgccacgttggccgggctggtcttgaactcctgacctcaagtgatctgcccacctctgcctcccaaagtgctgggattacattcatgagccaccgtgcccggcctgtctttgctatttgccaccagctctctgtgccctctgtgcactcttaatctactattgcttcctgaatctctgatattgacaccattatctctgccccatccatctgagtttgttctctttgcctcactcgctgttgcctcagattttgtctctggcaccatctccatatttgtcacttgtccccgtatcacttctgttatctctgccatgtgtctaacactgtccactatatctttatagcctttgggtctctgtcttctctgtctctatggctgtcaccttctctgtgtcggccacatccccttatctctttctcccctatcactgtcccttagtctctgtcccttctgtcacagtcctccctgtttctattactgtccccttggtatctctcccatcttcctccttcctcttcttcccctctccttctccttctccttccccttctccctctcctctccctctccttcttctctctttctctcactttttctttttttttttttcttttgttgttgttgctttgtgtttttttgacgtagtctcaccctgtcgcccaggctggagtgcagtgacacaatcttggtaaactgcaacctttgcctcccgagttcaagcgattctcctgcctcagcctctccagtagctggaactctccagtagcaggcactacaggcgccgccaccagacccgcctaatttttgtatttttagtagagacggggtttcaccgtgttggccaggatggtcctgaacttccggcatcaagtgatcctcccgccttggcctcccaaagtgctgggattacaggggtgtgccctcgcgctcggccgtctctcgcgtctttcttagactccctgatctctgtcctggcccccgggatctttgtcttcgtcccctctctagttcgctcccagcagattcactgtcttctctctctggtcctctcccctttgcctcggactgtatcctcttcgtcgctgttgatcccactgctgcactgtcctcgctgctgtcttctcacagtcctgtcgccatccccatcccctgcctcagtcccctgtgccgtcggccgctccacctgtgaccgtggagtctttttctgtcacttccgtctctgtcacatcccctctggtcgctcctggtcggaggccctgcctccctcgcctcagggcccttccccgctccttctcttcctgtcatccctggctccttcccagcgtctttccttccttctccgaatcgtcctctgctcctctgggtttgcgcctgctgggagctctgcccctgggagctgtttcctccgctcagtctctgggtgtttcctagggggtcacatgctcttctaggcctgtcctggggcagaggggtcgccctgaggtccatcagtcagtctgaccatctccttcgaacctcgagcctctcgcctcgcctcgcctgacgccctttcccgccctttatctttcccttcaggataaaaaataaaaagagtcggaagcatcagcgcctagggcccaatcgccactctggaacaggtgtgcgcggcgggtccgcgggctggcgggagctcacacgaactcacgcgcgagctcgcaggccgcggcggccggctggcgactagtgacgtcgcaggggcttgtccctgccttactggctgccttcgaccagcgcgcgcttgctggagtagacggccgcgcctttcccagcgccagggggcgctcagcgctagagctcactgaccctgggagccctatggagagactcgtgtcatcctggcaaccctgtcctacctgattggatacctgctgccgttcgttggatccattactctgatcggatgcctggtgggtcaaggcttgtacataactggatgcctggaaatgtggatctaccctacctttggcatgtctctctcttagcgggatatcttccgcaagcactggggatgtggacaaggaaagtaaattgagtctccgttggggagtgaggggtgttggacgtggcacgggaacccggccggagtcagcggacccaattggctgctctctctcagatacagttccccttcctccctccagggggcgccatggaacgcagggccctcactggctctggggactgggtgacgtcaggggtgagcctctcgtgattggctccatcaccctgcgtaagatcaaagggaagaaaggagagccccgacagccggagccattgtggctccggccgattgcgccggccctcgggccctcagggaggcgagggtgtgagggtacagagttcgaggccaacttggtccacattggtaggaaaaaaaaaattttttttatcgttccctatataacaacaaaacataaagggaggacgccttgataggaagaaatgacatcttcctaagtgtttttaaattacttcaatgtatctttttttttttttttttttttttgggagactgagcctcgctctgtagcccaggctggagtgcagtggtgtgatcttggctcactgcaacctccgcctcctgggttcaagcgagtctcctgtctcagcctcccgagtagctgggattacaggcccacgccaccgtgcctggccaattttggtatttttagtagagacggagtttcaccatgttggcgaggctggtctcgaactgctggcctcaagagatctcgccccttggcctcccaaagtgctgggattacaggggtgtgccctcgcgctcggccgtctctcgcgtctttcttagactccctgatctctgtcctggcccccgggatctttgtcttcgtcccctctctagttcgctcccagcagattcactgtcttctctctctggtcctctcccctttgcctcggactgtatcctcttcgtcgctgttgatcccactgctgcactgtcctcgctgctgtcttctcacagtcctgtcgccatccccatcccctgcctcagtcccctgtgccgtcggccgctccacctgtgaccgtggagtctttttctgtcacttccgtctctgtcacatcccctctggtcgctcctggtcggaggccctgcctccctcgcctcagggcccttcccggtctccttctcttcctgtcatccctggctccttcacagcgtctttccttccttctccgaatcgtcctctgctcctctgggtttgtgcctgctgggagctctgcccctgggagctgtttcctccgctcagtctctgggtgtttcctagggggtctcatgctcttctaggcctgtcctggggcagaggggtcgccctgaggtccatcagtcagtctgaccatctccttcgaacctcgagcctctcgcctcgccccgcctgacgccctttcccgccctttatctttcccttcaggataaaaaataaaaagagtcggaagcagcagcgcctagggccgaatcgccactttgcaacaggtgcgcgcggcgggcccgcgggctggcgggagctcacacgaactcacgcgcgagctcgcaggccgcggcggccggctggcgactagtgacgtcgcaggggcttgtccctgccttactggctgccttcgaccagcgcgcgcttgctggagtagacggccgcgcctttcccagcgccagggggcgctcagcgctagagctcactgaccctgggagccctatggagagactcgtgtcatcctggcaaccctgtcctacctgattggatgcctgctgcagttcgttggatccattactctgattggatgcttggtgagtcaaggcttgtatataattggatgcctggaactatggatcttccctacctttcgcatatctctctcttagcgggatttcttccgcaagcactggggatgtggacgtggaaagtgactggcgtctccgtgggggagtgaggggtgttgcacacggtgcaggtacccggcgcgagttagaggtccctattggctgctctctctcagatacaggtcactttcctcctgccaagatgcgccatggaacgcagggccctcgctggccctggggactgggtgatgtcacgggtgagcctgtcgtgattggctatatcgctgtgcctaagaccaaaggaaagaaaggagagcccggacagctggatccgccgtggttcagggtacacgttataggccaacctggtcaacaatgatttaaaaaaaaaattttattgttccctatatcataacaacaaaatataaagggaggaagacttcagaggaagaaattgcgtcttcctagccgtttttaaattacttcaaaaaaaaattttttttggacgaagtcttgctctgtcacccaggctggagtgcagttgtttgatcttggctcactgcaatctccgcctcctgggttcaagcgggtctcctgtctcattctgccaggaggttgggattacaggcacacgccaccgcgcctggctaatttttgtatttttagtggagacggagtttcaccatgttgcggaggctggtctcgaacttctgacctcaagagatcctcgcctcttggcctcccaaaaagctgggattataggggtgaggcaccttgcctggccgtctctcccgtatttcttagaccccttcatctctgtcctggcccctgggatctttgtcttcgtcacctctctagttcgctcccatctgattcactgtcttctctctctggtcctgtcccctttgcctacgaatgtatcctctttattgctgttgatcccactgctgcactgtcctcgctgctgccttctcacagtcctgtcgccgtccccatcctctttctcagtcccctgtgccgtcgggcgctccacctgtgaccgtggggtctttttctgtcccctcggtgcctgtcacaacccctcttgtcgctcctcccctgcctccctcgcctcagggcccttccccgtctccttctcttcctgtcatccctggctccttcccagcgtcttttcttccttctccgaatcgtcgtctgctcctctgggtttgcggctgttggggactctgcccctgggagagagaaatgcgaaacgtatttctgggagctggaagctgtttcctccatttagtctctggatgttttctaggtgaccacagcctcttataggcctgtcctggggcagagcggccaccttgaggtccatcagtcagtctgatcatctctgtagaacctcgaacctctcgcctcgcctcgcctgacgccgtttcctgccctttatctctcccttcagaattaaaaaaaaaaaaaaaaaaaaagacagtcggaagcagcagcgcatgagccccaatcaccactctgaaacaggtgcgcgcggtggcctgcgggctcgcgggagctcacgcgaactcacgcgcgagctcacaagctgcggcggccggctaggcgactagtgacgtcaccgaggcttgtccctgccttattggctgccttcgaccagcgcgcgtttgctggagtagtcggccacgccttgccaatcgccagggggcgctcagcgctagagctccgcgaccctgggagccctatagagagactcgtgtcatcatggcaaccctgccctacctaattggatacctgctccagttggttggatccattactctgattggatgcctggcgagtcaaggcttgtatataattggatgccggaaatttggatcttttctacgtttcgcatttctgtctcttagccggatttcttccgcaagcactggggatgtggagattgaaagtaacttgagtctccgtgggggagtgatgggtgttgggcacggtatgggaacctggcccgagtctgcggacccgattggctgctgtctctcagatacaggtccctttcgtcccgccaaggggggccatggaacgtagggccctctctgtccctggggactgggtgatgtcaggggtgattggctacatcgctccccagaaggtgaaatggaaaaattgagagcactttcccaccagcttcggtggctccatcaggttgtcctggcgcacaagctggcgatgctatgtgtttgaagctaacctgggcaaaattgaaaaaaaattgttttttcattgttccgtcataaagggaggtctcgacaggaagaaattgcgcttccaatagaattgtttttaaattactgcaatatatcttttgagatggagtcttgctctattgcctagggtggagtgcagtcttatgatctcgtctcactgtaacctctgcctcttgggttgaagagagtctcctctctcaccctgaggttacaggcgcacactaccacacttggctaatttttgaattttggcttctttttgagatggagtcttgctccgccgctgaggctcaagggcagtggtgcgatcttggctgactgcaacctctgccttccgggttcaagtgattcatctgcctcagcctcccgagtagctgggactacaggcacgtgccaccacgcctagctaattctttgtatttttagtagagaaagggtttcactgtgttaggatggtctctatctcctgaccttgtgatctgcccgcctcagcctcccaaagtggtgggattacaggtgtgagccaccgctacctggccttttaaaaaatttatttatttatttatttatttttattttgaggcggagtcttactctgttgcccaggctggagtgcagtggcgtgattttggctcactgcaacccccgcctcccgggttcaagcaattcctttgcctcagcgacccagtagctgggattacaggcgcgtgccaccatgtctggcaattttgtgtatttttaatagagacgaggtttccccattttggccaggctggtcttcaactcccgacctcaggtgatccgcccgcctccgctttccagactgctgggcttacaggcgtgaaccactgcgccagcctctttatcccttctatactgcataccccaagttgcaaactgttattagagtgaatacctaggggcaacttggatccttataatggacacctgatatttttgcctgagtgacatctgttatctctgattttcttcttcattaataattttttttggagcagtcttaggtttacaggaaaaaatcgaatgaaaagtaccgagagtttctacatcccccttcatcccttcattgcccctcatcttccctgttaacatcttgtgttactgtgctacgtttgttacaattaataagccagtattgatacattattattagctgaaatctgcagtttacattaaggtccactccttgtgtgataccttgtacagtctattttttttttaataaagtatttttttggtttttttttttttttttgagatggagtcttgctctgtcacccaggctggagtgcagtggcgcgatctcggctcactgcaagctccacctcctgggttcacaccattctcccgcctcagcctcctgagtagctgggactacaggcgcctgcaatcacgcctggctaattgtttgtatttttagtagagacggggtttcaccgtgttatccaagatggtctcgatctcctgacctcatgatctgcccaccttggcctcccaaagtgctgggattacaggcgtgacccaccgcgccaggccttttttttttttcagttttaaaatcacagcaaaattgagaggaaagtccatagtttacattcagtttctctcttagtgttttattgtctatgggtttgaacaaatttataatgacatgtgtccaccattatagtattatgcagagtagtttcactgtcctaaaactcctctgggctctgctgattcatccttccctcctcccaaacccctaaaaaccaatgatttttttttaactgtctctatagtgtttccttttccagaatgtggtatagttggaatcataccatatgtagccgtttcgtattggcttctttcacttaacaatatgcattttaggttcctccatatcttttcatggcttattataactgattaatattccattgtatggatgtactgcagtttgttcatctactgaaggacatcttgtttgcttccaagttttgacaattatgtacagagccgctatgaatatttgtcttcaggtttttgtgtggatgtaagttttgagctcatttgagtaaataccaaggaacatgagtgctgcaatatatggtaagagtgtttagttttgtaaggaagtgccaaattgtcttctaaagtggctgcaccattttgcattactgccagagatgaataagagttcctgacgttcctcatcctcatcagcacttggtgttattcatgttttggattttcaccattctaataggtggttgtcgtatgtcatcgttgctgtaatttgcaatttcctaatgacatttgatgttgagccccgcttttttttggagacggagtcttgctctgtcgccgaggctgaagtgcaatggcatgatctcggctcactgcaacttctgcctcccaggttcaagtgattctcctgtctcagcctcccaagtagctgggattacaggcatgcgccactacgcctggctaattttgtatttttagtagacatggggtttctccatgtcgatcaggctggtctcgaatgcctcgcctcaggtgatctgcccaccttggcctcccaaagtgctgggattacaggtgtgagccaccacgcccggcccaagtaccttttatttatttgtttgtttgtttatttatttattttaagaaacagggtctctgttgcccaggctggagtacagcagtgcaatcatagctcactgccgcctccaactcttagatcctccttctcagcctccccagtagctgggactacagttgtgtgctgtcacacctggctatttttttatttctatttttattattttatttatttatttatttagaaacagggtctcgctctgtcatccaggctggaatgcagtggcactggaatctctgctgactgcaacctctgcctcctagactcaagtgatcctccgacctcacctttccaagtagctgagaccacaggtgtgcaacaccacacctggctagttttttgtatttttcgtagagatggggtttcaccacgttgcctggctggtcttgacctcctgagctcaagggaattaccagctgtggcctcccaaagtgctgggattgcaggtgtgagccaccacatctgacctttttatttttattttttgtagagatggcgtctcagtgtgttgcctaggttggtctgaaactcttggcctcaaatgatcctcctgccccagcctcccaaagtgttgggattataagcgggagccaccacacctggccaactatctttttatttacttatttgccatctgcatatcttctttgttgaagtgtctgttcagatctgttccctatttttaaattgggttgtttgttttcctattgttgagttttagttctttgtataccagctttcttttttctttttctttctttctttttttttttttcagacaaagtcttgctctgttgcccaggctggagtgcaatggcgcaatctcagctcactgccacctccgcctcccaggttcaagtgattctcttgcttcagactcccgagtagctgggattacaggcgcccaccaccatgactggctaatttttgtatttttagtagagacagcattttgccacgttggccaggctggtctcaaactcctgacctcaggtgatccgcccacctcggcctctcaaaatgctgggattacagatgtgagccaccacacctggcctggataccagctttttgtctgaaaggtgttttgaaaagattttctcacaatctatagcttctctttttgttctcttaaacatctgattttcctatcactcctccccatgcaaaatatacattttttaactggatcttgccagggatttcagagtgagaacaagagtcagacctggccaatctgagtgcttcatgaccttggttatgatgtgcagtagtttggatgtatgtcccatccaattttttttttttttttttttgagacagagttttgctttgtcacccaggctggagtgcagttgcacaatcttggctcagtgcaacctccacctcctgggttcaagtgacccttctgcctccgcctcctgagtagctgggattacaggcacatgccacgcccggctaatttttgtatttttaggagagacggggttttcccgtgttggccaggctgccttctaaatttcgttgttgaaatttgatccccaatgttggagatggggtcctaatgagaggtgtttgggtcacaggggtggacccctcacaaatagattaatgccctccctgggagtgtgggtgagtgagttcttcctccattagttcccattagagttggttgttaaagagaggctgacacttgcctctcttgcttcctctattgtcacgtgatccctgctttctttctccttccaccaagagtagaagcagctcaagactttctctgtatgcccaatcttccagccagaagaatcataagccaaatacacctttttctctttataaattacccagcctcgtggatcactttaggtcaggcgttcgagaccagcctggctaacacggtgaaaccctgtctctactaaaaatacaaaaaattagccaggtgtggtggcgggcacctgtcataccagctacactggaggcaggagaatcacttgtacctgggaggcggacattgtagtgagccaagattgcaccactgcactctagcctgggtgacagagcaagatcctgtctcaaaaaaaaaaaataaataaataaaaataaaaattacccagcgtcaggttttcctttatagcaagacaacatggactaagacacatggttactatagaaatggacatgtgacccaagttggaccaatgagagctaaccttgagactttggtatcaccattcaggaaagcagtacctcttttctgctaggttgttaaaatgatagtatggaaactttgagctgctgtgggccctgtttgtcaccgtgagggaagagattctgcctgagaggaaagtcaagatacagaaaagtaaagcccagatgggaaatgagctgtattgctaaagattcattttagtgcctggatccagttatgcctgaagctagttatacagctcggttctataagtcaacaaattccctttgttaaaaacaaaaaaaagccagagtactttccagagagcaaggcttattataataataattaaagcagcatactcttgcgaggaaaaacaaataggccaaaagaacaagacggaaaaatcaggaaaagttcacacatatatggtaacttggtttatgacaaaagcaacatttcagtgcagtgagaagcaaaagatgatctttttgaatcaatagggctgagccagttgatagccatatgacctctacctcacaccatacacaaaaattgattccagatgtgttgtagatctaaatgttaaagcttaaacaataaaacttctagaagaaaatatcatagagtatcttcagaaccttcagggtaagaaaatatttcttttatttacttgtttgtgttaatagagatagggtctcgctatgttgcccaggctggtctcgaactcctaggctcatgtgatcctccctcctcagcctcccaaagtgctgagattacaggcatgagccagtgtgcctggccagaaaatatttcttaaaccagaaacaaaggagccttaactataaaggaaaatgttgataaattggactatattaaaatagaaactgatccttatcaaaaaataccactaagagaatgaaaagagaagccagagagtgggagaagaatatgtattctaacaaaagactcataagaaaaataaagaaagaactactaacctgttttttaaaaaaggcagaaaaaccagtcaaaaagtggacaaatggcgtgaattgacatttcacaaagtagcatattcatatggccaattaatatttgaaatggtgttaaatttctttctatttttttttttttttgagactgagtctcgctctgtctcccaggctggagtgcagtggcgtgatcttggctcactgcaagctccgccttccgggttcacgccattctcctgcctcagcctcctgagtagctgggactacaggcacccgccaccgcgcccagctaattttttgtatttttagtagagacggggtttcaccgtggtctcgatctcctgacctcgtgatccacccgcctcggcctcccaaagtgctgggattacaggcatgagccactgcgcctggcccgaaacggtgttaaatttctttaggcattgggctaaaggtaaattaaaaccataataaaacacggctacagccccaccagaattgctaaaattgaaaggactaacaataccaaatgttggcgagcaactgaaattctcagagactgctagtgggtgtataaatggagaaaattagtttgaaaacctggttggcagtgtctatgaaggatgaacatgaagctgggaatggtgactcacgcctgtaattccaacacttcgggaggcggcagatcacctgaggtcaagaccagcctggccactcccatctcaaaaaaaaaaaaaagatgaacatgcacacaccatgtatacaccctgggacccagcaattacacttctaggtatatacccaacagaaatacagaaatgcctacatatgttcaccaaaattcaatgtatatagcagtactataagtgatcatgccaaatcagaaggcacctaaatgtcaatcaacagtagaatggatacatagattattatgtattcccataacacacttttttttttttgagacaagattgtcctctgtcacccaggctgtagtgcagtggtgtgatctcagctcactgcaatttctgcctcccaagctcaagccatcctcccacctcagcttcccaagtagctgagatgacaggcacgcaccaccacaccccactaatttttgtattttttttgtagagacggggtcttgctatgttgctcaggctggtcttgaactcctgtgctcaagctatctgcttgcctcaccctcctaaagtgctaggattataggcatgagccaccatgcctggctcataacacactcttatacagcaatgacaatgaacaacctccaacaatcagcaactacatggacaaatctcatagacgtatgatgaataaaacaattcaggccaggtgcaatggctcacgcctgtaattccaacactctgggaggccgagatgggcagatcacaaggtcaagaaatagaaaccatcctggccaacatggtgaaaccctgtctctactaaaaatacaaaaaattagccgggtgtggtagtgcgcacctgtaatcccagctactcaggaggctgaggcaggagaatcgtttgaacctgggaggcgaaggttgcagtgagctgagatcatgccactgcactccagcctggtgacagagcgactctccgtctcaaaaaaaaaaaaaaaaaaaaaagagagaattccaacacacaagtctctatgcttgtaggattccaagcagattaagataaaaaacaaggcaaactaacttatggtgtcagaaatcagggtagtagttacttttgaggtaaagaagtgactgacaaggggccgggcgcggtggcttacgcttgtaatcccagcactttgggaggccgaggtgggcagatcatgaggtcaggagatcgagaccatcctggctaacacggtgaaaccccgtctctactaaaaatacaaaaaaattagccatgcatagtggcaggcgcctgtagtcccggctactcgggaggccgaggcaggagaatggcgtgaacccaggaggcggagcttgcagtgagccgagatagcgccactgcactccaggcgagactctgtctcaaaaaaaaaaaaaacacaaaaaagtgactgacaaggagcatgaggggtttggagagctggtaatgttctagttcctgacccagggctggttacccatggttacatggtgtgctcagtctgttatctgatccatacttactgggtatttgtgagtttctttgtgagtatgttgtacttcaataattgtttttttgaaactgggtctctgtcatccagactggactgcagtggctcaaccatggctcactgcagccttgacctcctgggctcaagcgatcctcccacctgagtagctgggactacaggtgcacaccatggcacttggctatttatatatatatatatatttaaagagatggagtcttgctatgttgccaaggctgggtctcgaactcctgggctctagtgatcctcccatcttagcctctcaaagtgctgggattacaggcatgagccaccgagcttggcaataattttttaaaaggccagttttttgtctcttgaaagtggaggagtcttggcaagtccagcaaatggcatatactattttgtttctcttccctcccctttcaagtgagaattgtgattgttttcttgtttttcctccactgttatacacaggggtgggttgctgagggggctacaatttcatttaacattaattttttttttagatggagtcttgctctgtcaccaggctggagtgcagtggcacaatctccgctgactgcaacctccgcctcccaggttcaagtgattcttctgcctcggcctcccgagtagctgggattataggtgtgtgccaccatgccgggctaatttttgtacttttagtagagacagggtttcaccatgctggccaggctggtcttgaactcctgacctcaggtgatccacttgccttggcctcccaaagtgctgggattacaggtgtgagctaccgtgcccagccttaacattaattttcaggatcaagagagactccatgtgcccttgatgaaaggaatagccaatatccagaaatcttggtctgaggattggatgtggctttgggatccctccctttgcagaaggggtgaaagcttctgcagttgcactagagatagttatgttaggtgggagtattagttttagccaactttatcaaaatataatttgtgtacaagaaaatgtatcaatatttcaaaaagatatttgcaacacactttcatagcagcattatttacaatacccaaaaggtgaaggaggcaacccagctgttcatcaacaaataaatggttcgacaaaatgtggtatatacacataatggatttttttttttgagatggagtctcgctctgtcgcccaggctagagtgcaggggtgcgatcttggctcactgcaacctccgcctcccaggtttaagtgattcccctgcctcagcctcccgagtagctgggactataggcgcctgccaccacgcccggctaattttttgtagtttagtagagatggggtttcaccatgttgaccaggatggtctcgatctcctgacctcgtgatccgcctgcctcttcctcccaaagtgctgggattacaggtgtgagtcactgtgcctggcccataatggaaaattatttaaccttaaaaaggaaggaaatgctaacacatgctacaacatgggtgaagcctgaggacattcatgctaagtgaaacaatcccatcacaaaaagacagatgctgtatgattccacttacatgaggtacctagagtagtcaaattcatagggaatttcccagagagtagaacgtgcttcccaggggctgggaagggaaggcagtgggagttgcttgatgggaacagtttcaattctacaagaggaaagagtggagatgagtaggggtgatgattgcacaacaatgcaactgtacacttaaaattggctaagtcctggggaggtggctcatgcctgtaatctcagctactctggaagctgaggcaggagaatcgcttgaaccggggaagtggaggttgcagtgagccaagatcatgccattgcactccagcctgggcattgcagcgagactccgtctcaaaaaaaaaaaattggctaagatgataaagtttgtgttatgtgtattttgcaacaatgtacaagaatttaaatgaaccaattttaagcgcaatgaattttgacaaatgtattcggttgtgtgatcacttccatcatccggaaagtttccctgtgtccactagtaatcagtctctccataaccactgccactgcccccagtcaaccactaatccattttctgcccctgcgtattagccttttcttttctcttttcttctcttctcttcttttcttttcttttactctgtcacccaggctggagttcagtggtgtgatctcagctcactacaacctccgcctcccaggttcaagccattctcctgcctcagcctccaaagtagctgggattacaggcactcgctaccacacccggttaatttttgtatttttagtagagatggggttttaccatgttggccaggctggtcttgaactcctgacctcgtgatccacctgccttggcctcccaaagtgctgggattacagggtgagccactgtgcctggcctctggcgtctttctttctttctctttcttttcttttcttttcttttttctttctttctctctctctccttccttccttccttccttccttccttccttccttccttccttccttccttccttccttctctctctctctttctttctctcttttttgagttggagtctcactctgttgcccaggctggagtgcagtggcatgatcggctcactgcaacctccgcctcccgattctcctacctcagcctcccaagtagctgggattacaggtgccaggctgcttttgaacttctgatctcaagtaatccgcctgcctcagcctcccaaagtgctaggattacaggcgtgagccaccatgccctgcccatattagtgttttctttctacagtttcacaaaagtggaatcctacagcatatacccttgtatctggctgtatcacacggcatcatgtttttgagatgcagggcagcagtgccatcacagctcactgcagcctcaaactcctgggctcaagtgatcctcctgcctcagccaccagagtagctgggactacaggtgagcaccatcatgcctggataattttattattattattattattattattattattattatacctggataattttattattattattattattattattattattattattattattactactactactactactattatttgtagagacagggtcttgctatgctgcccaggctggtctcgaactcctgagctcgagcaatactcccacctcgacctccaaagtagctggaactacaagtgaacatcaccatgcccggccaatttttttttttttttttaagagaatctcaccatattacctggtctcaaactcctgggcttgagcgatcctcctgcctcagcctcccaaagtgctgggatttacaggcatgagccactgtgcctggtggttactaccacattgacttcagacttctggcctccagagctgtgagagaataaatttctgttgttttcagctaggttattgtaacttgttacatcagtcctagcaaactgacacagtgattggaccaatttttgcagtgggagtttttgaaatgttgtgtcccggaatgtagatgtgaattagtgtgaagtagctgagggtagaatgtagtggacacctactgctttgagggactgtcccttgcccattgccgtgtgattcacttggaactgtcagtcaagggacccctacatatatggcttccaggagatgaattcatccctccagcaaaaagggatgaggtgcagaggggctttggaccaatcctgggcaagatgggcaggggaggaggaggaggagtcagcaaaggcaggaggcgggcccaagagtaggctccaaactggacccaatgattggcccggggtgtctccaaggtctgcgctggaccaatcagaatcctgttcctgaatgacacagcagctgggagccagctgattctcacattgtttcctctgaagttatctgctctgaaggcaattacaagtcctgttaatttcttgcaatggcagcagatcctgttaatttcctacccaacaatagttcccctccccgtgcttcctctaggcaaagcccgcaccccaccatggggactggaaatgacagatgttcactacccagaccgctttgcaactcggggtagccacacagccgggttctggcaagagagaaataaggagaattattctgaggaggaaaaatggggaacacagaaggggaggccccggtctacactgcctgatttagatgccagtgtgtgaaaacatgatgctgctatagacagtttgtactcaggaggggaacgaacaccagtctcagagatgccaaccagagcctaatgttgttgagcagctgaaccaaccctgggactgtctttgaaaaatttgatatgcaaacatgcaaaaaaatctttctctttcagttgggaagttttttttttttttttcagccgaaggtatcataacagatacagcattatacacctggagctccaagtgaccatctcattgccactgcaaacacctacccgagagagaagccaatagccaggcgcggtggctcacgcctgtaatcccagcactttgggaggccaaggcgggcagatcacaggaggtcagcagtttgagaccggcctgccaacatggtgaaaccccgtctctactaaaaatacaaaaaattagccaggcgtggtggcgagcggctgtaatcccagctactcaggaggccgaggcaggagaattgcttgaaaccgcgaggttgcagtgagccgagatcacaccactgcactccagcctgggcaacaagagtgaaactccatccaaaaaaaaaaagaggaaagcagaagtgagagtcccttgaacagcctgaagtccctctgtgttcaatgtgttcataggctttccatggacagaggtctttcaattctgtttatggctttgggttgaattttgtgttctgtactcacaatgatcctgactaacaccatttttataaactgaggctcagagagatcattaagttgcccagtcattgaaagaaacacaaatttgtctgcttgcagagccagcatgttccaatccggtttcccagtctcagagaggacaggaggcccagttggagtgagacccacagagtgtgtttattctggcgttgatagcagcagcagtggggggaccggccagacgcaggggtgtggcgaacagaaggggtggacacaggtgtgtgtgtgtctgaaaggacagagaggattggcccattgacattcacggcgagaacaagggtcgggacactgagtcttggacaaacagcaaagagacagagacagacagagggttttggggggcaggggtcccccagacatgcatggcccctcgcctcgagggggagccccagggaagaaaagacagacacagtggaggctgaatgacccccaccctgaaagaaggagctgggccggcctcctctcatcctctcgcttccagggttaggaagcctagggccagggctgccccgcaccagcagctcggacgttatggcttcaaggagatgaattcacggtccgggcaggaaaggatggggtcctgagggagcctggtccgatcccgggcctaggccagacctgcacgatggagcaggaaaggaggggtcagcaatggcagagaactgcaccacgacctcctgtagctccatcaccacccagagatccaggagtcccaggcgcagcccctcctccctcagacccaggagtccaggcccccagcccctcctccctcagacgcaggcatctccacccccagccccttccctgtggccaggctgcttacccctcactcggagttctctttctctgatagtcctttgctgccttttgtgaagctggtcacagtcttttcctaaaggagaaagtgcagaaggttcgggagtgagagacagagagttgaaacagatgctaatcatcaacaggagaagacgtcaatcctgtttcattatttaggatgcgctttctcacttggccctgaagtgacggacagatggtattacaattccattctacagatggggaaatggaggcacaaaaaagaggagtctctgcaaatgcgaggagagatgaggctgtagggatgagtggggcaagtcctgcatggtatcagaggggctgagactctgtcctggggccactggggagccacgggagggctgtgagcaaggaaggggaggggaagctctgggtgtagaaggatcttctggggccacagggagcatgaggggctgaaattcatgggcagtgtcaggactcggcctagactctgtgccaccagcgttgcccaacatgggcagtggctcaccagaaactcctgggaaggttggtgggatgaattaatgaacggatgaatgagtgaatgacaggaggagggagtagcctccatcctatccaccttagtagagtccccgtcttttccaatctcaaatctgagttctgtgcccaggtgtcgggtccctcatgatcactggaaaaaagcccacagcagggccagactaaatctggtgatgtggtgaaagtttcacccagtactaaatgtaaatgtgtgccccaaatgcagcaatcaagataaagaatatttcatgcaatattggccaggcgcggtggctcacgcctataatcccagcactttgggagcccaaggtgggtggatcacttgaggtgggaagttgagaccagcctggacaacatggcaaaaccctgtctctacaaaaaaaaaaaaaaaaaaaaaaaaaaaaaaaaaaaaaaattagcagggtgaggtggcacacgcctgtagtcccagctacttgggaggctgaagcaggagaatcacttgtactcagggagggggaggttgcagtgagccaagactgcaacactgcactccagcctgggtgacagagtgagactctgtctcaataataacaataataataataatgcaagattttaaaaaaaatcaaaattaatgcaaaaaaatcaatgatgaagaaaatatcaaatttttaaaaaaggccagtctcatgccacatcagactgctatttcaaaggaaatgtatgtgccctcatatacttgctttttttttttttttaaggagaggggttcctgctccattgcccaggctggagtgtggtggtgagatcatagctcactgcagtaacaaactcctgggctcaagagatcctcctgcctcagcctcctgagtagcagggactataagcacacactaccatgcctagctaattcctaaattatttttgtagagacaggctctccccatgttgctcaggctagtcttaaactcccaggctcaagtgatccacccaccttggcctcccaaggcctgtgctgggatttcaggcatgagccactgtgccctgcccaagtttttatatattttttctaaatttatttttcctggaatgctaaactagttgaaaaatactgaaaaatgaagtaagtgtgttgaaattcacaacattattttacatttaaatctttcatatataccctagacagaatttgaataatttgactttcttggcttttaatggaggcaaatctgccaataacactttctaaagctacttctttgctcctcttgttttctattgagagaatggccatgtttgattatttctcctgatcaagcgataatcttaaatgacttttttttttttttttgagacagagtcttgctctgtcgcccaggctggagtgcaatggcgccacctcagctcaccgcaacctctgcctcccaggttcaagcgattctcctgcctcagcctcccaagtagctgggattacaggcgtgcgccaccacgcccagctaattttgtatttttagtagagacagggtttctccatgttggtcaggctggtctcaaactcctgacctcaggtgatccaccctcctcggcctcccaaagtgctgggattacaggcgtgagccaccacgcccagccccctctattttcaacttagcctcatgggtaacaacagcagcgaccacctacagaacgtttaactcagcacatctcacctctatcctaacagaagatgctatcaacagtcccatttcctagtgggtaaattgaggcacagagcgcttgggtaactggctctaagccgcacagctaaagttggcacagcagggattgaaacctaggacgcctggctctgcgactcacgaacatgcagggcgttcgttgcatggatgaaggggccgagggtgcacgggtgcttgtcaggggtcggtgtgggacccctactcacctccactagctgatgccagtgctccacgggcttgcggggattggccagcatctctgcccagtgctcgcggccgtgcgggtcggcagcgtcggggcccacacggcacacgccgatcacctcgttgtgcccgatgctgggggttggggtcagtgaggaccgtggagggtggtgggagggcctgtccccaccccagccctcctgcctgacccccgcccgggccgcgcccctcaccagtcgtagtctaccacggcgatgctgagccccacgttctccacgctctcgggggccacgtcgaacaccagcgcctcattataggtggggttcagcgtgttcttcttgatggaggttttccgcttcttcagacgccgcccctcgctgatcagggaggccttcacgtaggggtctgggaacagcaatgaagtaaggaacagagactcactccctcagacctaggggtccaggaccccaggccccgagcccctcctccctcagacccagaggtccggggccccaggcccccagtccctccttcctcaggcccaagagtccagaccccaggtcctcctctctccgacccaggagtccaggcccctggcccctcctccctcagacccaggagtccagatccccagctcctcctccctcagacccaggagtccaggcccctggcccctcctccctcagacccaggagtccaggcccccagccctcctccctcagacccaggaccctcacctgagaagccagtgaggtccatcgctttgaggttagaggctttgatgatggtcacggtgaggcgcccggccgtggggaggtagcagagtgagaagttgagctccccaagatctgctttttcctgcagttggggaaaaggtcagcgatatcttgcctcagcccctcttcaactctccctgattttctctccggtcggagcctcctgctttacaccctgacatccagggctcaggcttcccatccacttagcaatctgactcttgggacaaggcccagtaattccctggccacagctgcccatgaccatcaaagcttatttgttctgcaggaaagattggaagaagcatgagtgaggggagagagagaggaggggagagacagagaaggtgagagagagagaaaacacaaagagaaatagactgagacagaagccaaaacacggagggatacagctggaaagacagacccacaggcaaagttctcaagtcagagggacagaggcccagagacagacacagagagagacccagagagagggagacagagacccagaaagagagggagacagagacccagagagagagggggacagaggcccagagagagagggggggggacagagacccagagaggaggacagagacccagagagagaggaggacagaagcccagagagagaggaggacagaggcccagaaagagagggggacagagacccagagagaggaggacagacccagagagagaaaggggcagagacccagacagagagggggacagagacccagagacagagagatagagacccagagagagacagaagcccagagacagggggtacagagacccagagagagaaagagagagagatatatatagagagagactcagagagagacagaggcccagagagagagagggacagagacagtgggttgggggtgcataaagacccagagagagtgatagttacctagaattagagtggaggggcagagaccagagagcgagagagaaacctagactcagataccctactccctgcaccaagagaaagagagagagagagagagaggctgactcagacagagtgggacaaagaccaagcagacacacacacataaaccagcctgagagagggcaggagattcatcaacctccaccgaagtttccaggactgcccccaaccctgacacacaggctggagccacgctggagctagctgggagctttgaccaacctggcctagccctgcggcctcccaactgtgcccaggactccctactcattcccctcagggcatctgcccaggctgtccctctgccagaacactcttccctctatctctccttggcctttgagcctcccctcgttccacaagctcccagatcccccacagccctgcagaggctcctcctgtgcctccccataaccctggcccctgacacaaggcccgaccatctagacctggagctgccgagggctgcctggggtccccaggccctgctcctgaaaaaaacagtggttgaagaaatgaatgaaggctgggtgcagtggctgatgcctgtaatcccagcactttgggaggctgaggtgggcggttaacctgagctcaggagttcgagaccagcctggccagcatggcgaaaccctgtctctactaaaaatacaaaaattagccgggcatggtggcaggtgcctgtaatcccagctacttgggtgactgaagcatgagaatcacaatcacttgaacccgggaggtggaggttgcagtgagctgagattgcgccactgtactccagcctgggtgacagagagagactctgtctcaaaaaaaaaaaaaaaaaaatgagagagagagaatgtatgaatcaatggaatgagtgaggaaaacctcaagtgatgatgatggagagagaaaatgagaagggtgagcacaagaattaggccagcatggatacagagagaaggccctggcatggggctgccatgggtgatgactgggagtaggagctggtggaatacacaggggccctgggaccttggaactgggcacttcaatctcaaaggctgggcttgggggccaagcaggcaggctggggagggccccatgaagaagcctacccaaagagctacccaaaaagcctacctggcacccagctcaactggacatctgtcattgaacagatggggaaactgaggctcagaaaaggaaagaaccttgaggaggtctagtcctctcctgatatgaaggccgccctccccacaacacacacacagctaccccagattggcagagaactggaatgttggataatccacaaattaggttggagcgggggcgctgtagagttgaggatctgagatttggtggggcagaagagctcaggacacacacacaagaagtacctaagaatggggctggggagggattggaggtacagggagaatgagataccagagggcaggggtcgcaaggaataaggaagaagccattgggccctataatctggatgctgggagaactgaggagtgtctgcatattggggatcccaggatggctgaggcctgggggatcaagctatcagcattcgggcagggaccatgaaaaaacagagggtcagaatatgaaagagttccaatgtcaggggttgggaaaattcagaagttcagagattagagagggattggggctttcagaagttcagagattagagagggactggggcttccagaagtccagtcattggaaagtcaggaagttaggaaggtaagaagtctggggtgagaggggagaagtcatggggttgaggcaggaaggcatcctatggcaaagcgggtgagaggttggaaaatcggatccagacctgatgctaacatttggcgatgttgaggagaggaatggtgtccactgtatcattatctgttcttttttttttttttttgagacggagtttcgctcttgttgcctacgctggagtgcaatggcatgatctctgctcaccacaacctccacttcctggtgcaagcgattctcctgcctcatcctcctaagtagctgggattacaggcatgtgccaccatgcccggctaatttttgtatttttagtagagatggggtttctccatgttggccaggctggtctcgaactcccaacctcaagtgatctgcccacctggcctcccaaagtgctgggattataggcatgagctaccgcgcccggctcattctctattcttgcctgtaagtttgcagtcttccccagtgtgatacattttaacagaaaaatgtggggacaagaagtgaggaagttatgaactctgagggcagggggcttgcaacccggggggtctcagggccctgggaaggggaaggtcaggggagagggccactgaccgagccgccctccacgatgtccctccagagcgggcggtcagggggctgctcggccagctccaggaggttgtccagcaccacctggccgatgaggtcgtgccgcgagaagcggtcaaagtcatagacgctgaagtgcagtttgcgttgggccagctcggccaggggcaccgagaattgaaacgtctcattgaagacggggttcagggtcttcctgtgcacctggtggtggtgggcgacaggagacagacaccgtgcccataagcccctcctccacaggatccaggagtccagcccccagcccctcctccctcagacccaggagtccaggcccccagcccctcctccctcagacccgggagtccaggcccccagcccctcctccctcagacccgggagtccaggcccccagcccctcctccctcagacccgggagtccagagccctagctccctctctgtgggaacccggtgtccagcccgctgctccggaccttggtctgaaactttttcttgcggtcaggcagcaggtagatcttgacgtaggggtctgagaagccgttggagtccttggcagggaggtccagggcctgcaggatcctcaccaccagctggtccgagccatagaggtaccgcagggcgaagctgatacggccacagggtgcccctgtgcctgcctctccagagcctgggcccccaccgctccgccggccaccagggccagtcccctggtacagctctggcttaatctgcccaatgagtttggctttttcctcgcctccaggcaggggtaagggcagggcaggtggccgctcctcactgctggggtccggctgggaggtcagagtctgctgggtgaggggtcggggcagggctgggtacctgtagggggttggggggagaccaaggtgaggtcagtggctctgatcttcgactgcatgcagagacctgggagactcctccctgcctttccccccatcccccagccaggtggccacaagtcccctcctttgctcactgtgtgagcttgaggaagccactgtgctctctgagcctcagattccccattggtatctggggggcattccttctctccctccctccctccctccctcccttctttccttccttccttctttccttttcttttgagacgaagttttgctcttgtcacccaggctggagtgcaaaggcgcgatctcggcccactgcaaactctgcctcccaggttcaagtgattatcctgcctcagcctcccgagtaactgggattacaggcatgcaccaccatatccggctaatttttatatttttagcagagatggggtttcaccatgttggtcaggctggtcttaaactcctgacctcagatgatctgcccgcctcggcctcccaaagtgctgggattacaggtgtgagccaccacacccagcctcattctccccatttcaaagctagctccagcccagacctgtgcataaaccagcttccagtaacctcttttggacctcaagctggtgacccaggatgcttctccatggacccctggcagaccttctttgaacgctcttctgcccttctcttaatctccccggctgtctctcctctctatccccactgtcctggtcacagctcaggccttgtcctctcctggactctcagcctccagtgtctccctccagcccactcccatatggccccagagggttccttctacacccagagctgagcctgcccctcccctgctcacagccctcccatggctcctcagtgccctcaggacaaagtcccagaccctcaggcgggcactcaaagccccatgtggtctggtgtctgtagtcacatctctgaagttttctttttcttttttctttctttcttttttttttttttttttgagatggagtctcactctgctgcccaggctggagtacagtggtgcaatcttggctcccaggttcaagagattctcccgtctcagcctcccgagtagctgggattacagacacacacaaccatgcccggctatttttgtttgtttgtttttgtatttttagtagagatggggtttcaccatattggccaggctggtctcgaactcctgacctcaagtgatctgcccacttcggcctcccaaagtgctgggattacaggcatgagccactgcgcccagcctgaagttttccgtttttcaaacttattctcatgccttggtgactaaggcttggtgccctggctgtccccttggtgtgggctgtcctcacaatgcactaggatctcgttctcctcttgtctttgcctgggcctctcctttcacctggaatgcccaggtcacagccctgcctctttgccttcccaactctccctcagcctgcaggtctcagctgagacatctccacctccaggaagctcccagccttctcccagttgcggttccctgagtcgctttcctgtctcaccaacctggctacaccaggacagccagtctgggggtcgcctcccctgcgctgtgagtgacaggagggcagagtctggtgttttcctaacacccctctcaggcctagtttatatcagtgctcaatatacatttacatgtatattgagaaataatgaatgaaggaactccaggtcccactaccaatcctggcttagggtgaaagggggtgaactgccttgtgccacaggggacttggggatccaaccttattctcctctactttcctgtcctaagtcctgcccccagtctcctccctctggacccaggaattcaggcccccagtcccctacttcttctggtccaaggggtctagaccccacagccccaacctccctcagatccaggagtctagggccccagcctcctctttccctaagatccaggagtcaataccccgattcccctccaaatcccgaactcataagagctatagataggaaagagacacagaggaggagcagaagttcagagtggacccccaacccagtatcctctctcacctggtagtgggtgccaggcttgtgacctgctgatgtgactgggcactgggcaagcccccaccactggggggcagcaggagcaacccagagcctgctcccccctcagagggcagctcaggggatgtttggctcggtttgaccccagcggccactgctgctgctgcagcctctggatacgagtccatgtccaagtaggagggctcaggggtgtcagaaccccccaggctgcctggctccagcagctcagcaaagggtggatggtgggcggcatgggcatggtggtgtgggccgcccagcagaggatggccacccaggccagccgccaggtggtgcccgcctccgcctaccaggcctgccagcccgacaccagggcctaggtctttgcgcagggggccaccgcccactgccgagcctcccttgtcccgccagggcacccagcacaacttccaggacacgaagagagagacacccagaaggacaatgccacagaatgtcacgatgaccgacagcaggctcacggagatgtctggagagaacgaggacagaggtaggggtcaggatggggtcacagtacatcctccctctgctgtccccaaagagttaacccttcatatttgccatgcaattgtccatgcaattgcaagtgccaggcactttacatgtattacttaatttatgttctacaactctacaaggttaagtattgtatttttttaaagagatggaatctctgttactcaggctggagtgcagtggcataatcacagctcactgcaccctcgaactcttgggctcaagcaatcctcttacctcagcctcccaagaagctggaactacaggtatgtgctatcacacctggctaacttttaaatttttctgtagagatgaggtcttgctatgttgcccaggctggctcgaactcctggcctcaagcaatcttcccaccttggcctcccaaagtgctgtgattacagatgtggccactgtgcccagcccagtagttctatatgaccattttaaagatgaggaaactgagacacagagagattcagtgatttgtttaaggttttacaagtaataaatgacagttctgagatttgaatccagcagtctctctccagattttattctcttaatcactagactttgctgcctctctataatagaacacaacatgtgaggtagcaccaaggtcctccaaaatgctcagagatggtcaaggaagcatggaccctgcacgacacagttaggcagggcagggtttaaatcacgcttgctgtgtggccttgggaacatatcttgaccactctgaaccttacatttcccattttccaagtaggaaaaatcagttcttccctcttacagtagtttgaaggaatgcagaaggtaaatcacatgtggaagataataacaaacatatcttgaggggtgattacataccaaatagctcagtactttatagagatcaggttatttaagcctgccaggcactacatgaggttggcaacatatttatccctgttttccacaaaagaaaactgaggtctgtatacccatagttacctgctcaaagtccatagctggtaggtggtagagtcaggatttaagtctgggaagcctggcttcagagcccatggtctttactatgatgctatcacacctcaacgcttcccaataaatggtagttcaaatgtgaatttttattagaataataaatcctattgctgccactatgtgcgtccaacaccatcaacaagatagctaacacattctgaatgccacatatgtgctgatatgccttgcagagaaacccaagtacagaattgttcttacaatcaaaggttttaggcttcttcagtaattggtaccaggagtggggtttttcagaaatgaccttcaaggaatgggaatttgttttgaaatggacttctgggtgttgacaaagtgaaagacagggaaaatccctactcctgacagacagtgggttatggtggggaagcaggtagctaggccattgccggcaaggacagctgagtggaatggctgtgtccagttatattaggggacacacagcaggaaggggttgccttctggtcctgtactgcttagtgaagctacagtggtgtgtgacattaatccttatgacattatataactttggaatgacttatcccattttacagatgagaaaacaggctctgagagagaggaagtggccctgcagggacatataccaggcactggcagaagaactctgggtttccttcccccctccctcttggggtgctttttttttttttttttttttttttttttgaggcagagtcttgctctatcatccaggctggagtgcagtggcatgatctcggttcactgaagcctccacctcccaggttcaagcacttcctgtgcctgagcctcctgagtagctggaacaacaagtgggcaccagcatgcctggctaatttttgtatttttggaatagacggagttttgttatgttggccaggctggtcttgaactcctggcctcagatccatccacctcggcttcccaaagtactgggattacaggcatgcaccaccatgcctggccagagtgctccttctctttttttttgagacagagtctcgctgtgtcacccaggctggagtgcagtgatgtgatctctgcggagtgcagtggtgtgatcttggctcactgcaagctccacctcctgggttgatgccgttctcctgcctcagcctcccaagtagctgggactacaggcgcctgccaccatgcccagctaattttttgtttttgtatttttagtagagatagggttttaccatggatggtcttgatctcctgaccttgtgatccgcccacctcagcctcccaaagtgctgggattacaggtgtgagccaccacacctggcccagagtgctcctttttaagtgaccaacactcactgagcattctgggtggcctgttagaaaccagaggcaaggactttatgagcctcctgaacacaggttgagttgagaaaacagggtcattgtggagaaaaattaaacagatgctttcccctaccgccagcctgattcagaccctgtccaactcaaaacatgaatcccacaaaccctgacagattccccattcctgtctgcacagactggggagttatttgggcgtggagaggtggtgtagttgcgcagtagaagattcaccttgcccagagaaaggtttggcccttgatcagctcccgggagggaacctctaagcccatggaatgtcctgcctgattagagtgtctttgtttacctggggccttggatcatgtggcatagtctatgttaacactgtgatatatgctggaggcctccagctcagcctctggaggagctggagactaaagtcagccacaccagcaatcagtcacgtatatgaggccgacccccaataaaaaccctgcccaccaaggctcaggtgagctttcctggttcgtaatagactgtgcatgctgtcacatgtcgttgctgggaaaattaagcactgtccatgtgactccactgggagaggatgactggaagctcacacctggtctgtcctggactctgccctgggtgcctcttccctttgctgacttcagtctgtatcctttcactgtcataaaccataaccatgagtataacagtttccagccaggcgtggtggctcatgcctgtaatcccagcactttgggaggctggggcgggtggatcacttgaggtcaggagttcgagaccagcctggcgaacaggatgaaaccctgtctctactgaaaatacaaaaaattaactgggcgtggtggcagacgcctgtaatcctagctactctggaggctgaggcaggagaatcacttgaacctgggaggtggaggatgcagtgagccgagatcccaccattaattacactccagcctgggcaacaagagtgaaactccatctcaaaaacaaacagacagacaaacaaaaacagtttcctgagttctgtgagtcaatgattctagcaaatcattgaacctgagggtggtcatgggcacctccagactacagtgctgtactagactatgcaggattcagttctgcctctgctaccattgagcctctgggcaagtgactgctgctctctcggccttatccctcatgactgtcacctggacatcctgcacatgaggtgccagaccctgccctggtgctcagcaagtgtgactgtggttgtaatcactcagcacatgcttcctctggtcaccgtttcctcatctggacaatggcactcataatgtttcctcattcccagaaccctgctgctttctagctgtgtgaccttggacaggtcacttcacccttctcagcctcagtttcctctgttgaaaatggggattatatgttccacaaagggtcactgtgagtaatcattgagatgtgcagaggacctcgcatgctgcctggaccacagttggtgctcagtaagtgaatcccagcattgttctaagttcttcgtaggtgttatatcatttaagtctttcatctgctctatgaagcatcccttttattatccccattttccagatgaggagactgagtcccagaagaagagtcacttacctacagccatgcagttattaataaagtgagggagatgggacttgaacccaaacaagtcagtctgactcaagagcctgacatttgcacaagatgcagagagatatctgaagggggcatttggtggtggtagtcggagggaggcccacagggcaaaactcaaaaagcagaccacacagctccttccccttggatcagagatttgggagaagggcagcagcaggcagaatgggggcaagacgctacgagggactgaccccacaagcaatggaaagctgagcagttctgctccgagtctcctggccatagtgcaagcagggggctggccaagacaggcaggggtgctgacctgcatctggaccccggggatagcctcggattcggtcattgaactcctggcacctgtcgttggtgtcagcatctcggacccgcgcacagaggtccgagaccaggatgagtgcccgccggcagaggtcatcctcgtagtctcctgacatggtggccgtctggtcctgtgtgtgggagggatggggcaagggtgcagatgggaaacagaatgggagtgcagggtgggcaggtgtggagataagggtggaaagagacaccgagaaaaggaaggatgggcaaaggggacagagattaggggcagatggattagggatggagattcgaggaagaaggacaaggtgacaggtattagggatggacaaggaaaaggaattaggagtagacagacaagagggcagaaattagggatggagatagtagcagggactgggtaagtcaaggggacagagatgggcatgagtggagtagaggacagagaacagggacaaatgaacaaggaggaagagatggagaagggcagtgaaggggctaagaatgaggatgcacaaataaagggatggacagatgaggaaacaaagattagggctgcacagatgaaggaacaggagttagggatgagcagacaaggtgccagccattcatcattcattcattcaacaaacatccatccagcaccaactacgccctacgtgctgtgctggttgctgcgaatccagcagagaacaaggtcctggagttccctgacctcccggtgtcacaatccaacgagaggagacatagagtaaacaagcaaacaaaaacacatacacaaaccggtcactgtcagactgtctgtgagaagcgctccacaggacacagctggagaatgtgtcacaaaggaactcagaggggggcggtcagggagggctctcccaaacctgaaggatgacatggagccagccacaggcggggggcagtggcgccaggatgggaaaagcattttaaagaaaagcattttagacagtaggagcaggatgacaggggcttagggtaggaaagcagttggagggtccagggaccaaggaggccagactggggtagacgcggggagggccaggagagaaggatggatgtgggtagagagattggaggtggataggtatggtgggagctgggggtggagaggtggagatgcagagatggggaccaagttgagggagggagagatacagggaggggagacagagataatgtgaagggcagactgaggctccgaagagatggagaggtgaacaggcaggcagaaggaaagtcaaggattgagacttgggatggacagtgacaaggaatgaaccgagatgtaattaattcacgggggcttgagagacgagaggacgagagacggtgaagaggggcaggcaggagtgtgggcagaaatatctttgaaagagaaacggtcgaacgggaggatggatgggtgggcaaggacagcagatgatggctagagatcgcagatagacaaaaggagacaggagggctgggcagacagacatgggttcataagggaaggttcaatgagcacataaatgagaggaggctaggaaggagaggtggatgtggggagagggggaattagtgacacatggctcggagccaggcatcaagatgggttgaaggggatgcaggggaattaggaacagacagaccagggctcacagatggacaggtgtcgtgggggtgctgcagaaggccaggactccaagacaggcatggccacactcacctgcgcttatctctgccgtgtcctgggtggcagccgaggcggcggcgggcggcagcccatgggggttctagggcggacaaggggctgtggacccgttcccacgcgccgggtaatgagagagaatgtctgatctaggggctgaggccgggagaaaaagctcagcttaacagtcacatcttgccctactcgagccagctgcccgaccccaggcgacccactgggagcccggccaccccctcccacctccgggcccccagctcccgttgagggcttagagactacaattcccggcaggtctcgcgctcgcgctgctgcggcttcatagacccggcgctgcaggatctgctgggagttgaagtccttaatgcctccgggctgcagagaggatgggattttttttttttttttaaggttttggggggttaagatgctggggtcccaagacgcttcaggggaggggaacgatgtccgggacttcgaaaagccacggagccctaagtccttaggggccacggaatgaggaaacgatccccccgcgctggggatcggtgggcgaggggtgggatacacccaggtgtttcgggacccccttccagggccacgtgcccctcccccggggtggccagagagcgctgcagcgctcccactccccggcccgagatccacgcgcctctgcatctaccccgcccccatgcgccggggccgaccccagggatttgactggggctggggctgtggcaggaggagggggaggagcggactcacccggagccgccgctgccgccgctgccgccgccgccgccgccgcagccccgcgcgccagccgcggtgccggctcggctcctcccctcgccactgtcgcaggtccgcggctcctccccctgcaccccctccttcccccactccgaacccgcggcaagaaagccgaaatcacttggcctcagcaaggaagcagggagattgcccgggactaaggcagcagagacccagtgggtttccacactggggacccagagatctaggatcacgacgtgctgcttctccagggtccgggggcccagttctccgccccgctatctcacagaggtagaagtccggggaccccaggcccctcttcccaggaacccaggacttcaggccctccaacctgagccgctctgaaggccggtggtaggagcggaagctgagactcaaaggtacagtgccacagccaggatagaggtactagcagggacctgggtttgaatcccacctgggccaactcctgcctgtgtgcgcctcttgctctgaggccccgtttcctcatcagcaaaatacacaccataaacttatttcctaagggatccacagtttgaaaaaccggtcagtgtagacaaaacattggtaccaactaggtacttaatgaatatttctcaaaagtagtgagtaacagtttctggtatattaatagcagttaatggcaattgtcatttcctataagtggtgaagtgctaagtgctttgaaagcgttttctcatttaattttcacttgggtgcaattatgacattcccatttcacagaggagacaactgaggcccatggaggttaaatcccttgggtaaggtctagatcaggggtgtccaatcttttggcttccctggactgcattgttgtcttgggctacacataaaatacactaacagtaacaatagctgatgagaaaaaaaaaatcacaaaaaaatctcataatgttttaagaaagtttacaaatttgtgttgtgccgcattcaaagctgtcctgtgctgcatgcgggcctcaggccatgggttggacaagcttgatctagatctacatagcctggagaggtggctcggaggccccctcagtgctctcaatcagtgacatccaaataaatacaacctctaggtaaaaatcaaaggctgggctgacacctgtaaatcccaacactttgggaggctgaagtgggaggatcccttgaagccaggagtttgagactatcctggacaacgtaggagactccatctctacaaaacaaaaaaaccaaaaaaccaaaacaaaaccaaactagtgggtgtggtggcgtgcacctgtagtcccacctacgcaggaggctgaggtgggaggattgctggagcccaggaatttttttttttttttttttttttttttgtgagacagagtcttgctctgtcgcccaggctggagtgtagtggcgcgatctgggctcactgaaagctccgcctcccgggttcactccattctcctgcctcagcctcctgagtagctgggactacaggcgcctgccaccgtgcccggctaattttttttgtatttttagtaaagacggggtttcaccgtggtctcgatctcctgaccttgtgatccacccgcctcggcctcccaaagtgctgggattacagacgtgagccaccgcgcccggcctagcccaggattttgaggctgcagtgagctatgattgcaccactgcattccatccagcctgggcaacaaagcaagacccccatctcaagaataaatagccaggtgcggtggctcatgcctgtaatcctagcactttgggaggccaagtgggcggatcacttgagctcaggagttcaagaccagcctgggcaacatggcaaaaccctgtctctacaaaaaatacaaaaattagctgggtgtggtgatgcatgcctgtagtcctagctacttggggggctgaggcagaaggatcacttgaacccagaaggtggaggttgcagtcagtgagccaagattgtgccactgggctccagcctgggcgacagagtgagaccctgtctcaaaaataaacataaatatgaataaataaataaatatttagagcaagaaataaaaatgtcaaaataagtaagtaaataaaagtaaaaattgcttgctgcttctgcaaatacaactttaagcacgcatcctgggccctccctctaattagattacaccctacccctattgctgcctatgtgtacattttgcagccattatactaccacagaacccccagaaatgcctcccaggtttgccgagtctcttccttgtggcttcttgcatccccccagatggatgtgtgtttacatccagggaagcatgtgcgggtgtaaacctacagaccacgagtgcaggtccccatgccaactctaacagcccgacccttgaaccctgctgggcctgcccagggtccacaggtagccctgttccacagggagagacacgcagtgatgcacacactcagagatgggcacacagatgggcttgccacgctgccatgacacgtttccaaagagacgctcggattccgaggctgcccaggcattgagaggcagccgtagtgcactggttttctgtgtgactttgggggcagagcactgggattcaaatcccagctctgctcccctctctatgcaaccttggaggggttacttagattctccatgcctcagtttccctctctgtaagtgcagataataatactttaaaaaatcatactctggctgggtgcagtggcacatgcctgtaatcccagcactttgggaggccgaggctggcagatcacctgaggtcgggagtttgagaccagcctgaccaacatggagaaaccccgtctctactaaaaatacaaaaattagccgggcgtggtggcacatgcctgtaatctcagctacttgggaggctgaagcaggagaatcacttgaacccaggaggcagaggctgcagtgagccaagatcatgccattgcactccagcctgggcaacaagagtgaaactctgtctcaaaaaaaagaaagaaagaaaaaatcatattgtatctcactgggttattttgagggttaaattaaattcatggaaggtgcttaggaaaaatggctagtgtttagtgttgtcataaataaaaattaaatgcatttgctcatttaaactttagctggacttgacaagtgaggaaattgaggctcaccaagggaagcgctctgcccaagatcacacatctggaaagtgtgagtggagattaaaaactgtatgggtctggaccaagtgcagtggctcacacctgtaatcccagcactttgggaggccaaaggtgagaggatcctttgagctcaggagttgagacttgcctggacaacatagtgagacctcatttctacaaaaaatacaaaatttagccgggcatggtggcacacacctgtagtcccacctgcttggggggaggctgaggtgggaggattgcttgagccccagaagtcgaggctgtggggaaatggaggctgcccagagtcccgtccttgtgccttcttgcatccccccggatggatgtgcgtttacatccaggctggagtgcagtgagccatgatcgtgccactgcactccagcctggatgtcagagtgagaccttgtctcaaaacacaaaaagaaaaaacaaaaaacggagtggatctgaatccagagcccttgcctttagccaccatgctgtttgcatctaggacccatttgaggacttgcatgctactgctgctaggagtatagaacaatataaagaacaccggacagggagccaggagacagagatagaatcttccatattcattcaactcgattcatgcagtcatttgagaaatactttctgagcacctaatgtgtgccaggcatttttttttttagacagcagggattcatctgggaacaaaatagactaaaattccagggttggaagagctcatggtctagtggaagagacagaaaataatcaaataactacacatactaggatcctcatactaggatcaatgctaggaaggaacatccattgtgctgtgtgtttgagagaggtcagagaagttcctgagcaagtgacttttcagctgagctcagaaggatgagtaggcataagccaggtggtgaagatgagggaggggaggggaaatgctccagggagaaggaacagctcatgtaagacctgggggcaggagggagtttggcaccttgagggctgtcaagcacacaagccccgtaggagtagcactttgttttgttcatagctgtgtcccagctgcctggcacagtacctggcgcatggtaggcactcaatacttattggttggttgaatgaatgaatgaacatgtgaatggataagtggaggaatgtgtgaatctatgatgtattgatggatgggtgcatgactggatagatgctggaaggatagatgaagggatggacagataggtggatgagtgaatggctggatggataagatggatgttggaggaatagatgaaggaatggatagatgaaagagtggatggttgggtgcatacatggatgattggatggatagatgaagagttagagtggggatggatagatggatactgcagaaatagatgaagggatggatgagtgaatggctggatggatagaggatagattggtggatagatggatggatgttggaggaatagatgaagggatggatgagtggatgagtggatgagtggatagttggatgggatggatggaagctgcagaaatagacgaagggatgaatgagtcagtggttgaatggatagaagatggatggatttgtggatgggtggatggatgttggagaaaaagatgaaggaatggatggatgagtggatgataggatggatggatgctgcagaaataaataaagggatggatgagtggagggttgggtggatggatggatgattggatgggtagatggagaattagataaaggatggatggattttggagaaatagatgaagggagggatgagtggatggctaggtgcagggatggatgattggatgattggatagatagatgaagagttagatagaggatggttgggtggatgttggagaaatagatgaagggatggatggatgggtgactgattgaatgagttttcacaaatacctacagattcacacacatatgtgcctggaggtagatgcagatacactcagaggcatgcacacatgtgtgtaaatacagattcacttgttctcctggtgctcctcctggagagagcaaacactgagaatggggaggtggggagacacaccttttggccagggctatggccatccctgccaccactgcggcgctgacagtatttctggaattggaggaaaacgctgattcaggggtgtgtgttttagactgggcaccaggccaggaagtgggacagggatggcccagagagatggattgagtggcagagggaagtcggtcggagtaaggcagagagacaggcaaggcgacagagaggtggagacacacagaagcagagagatggggaaataggcaaagtcatggaggcagagacagagacatagagagaaagggaaggaaagagagatggagacacagaaacagagatggggaaatagagtgatggagacagagacagatgtacagagagaaagacagggagagaaagatggagatacagagacatacagaaatctacagagatgcagacagtgagagacagagatacaggaatacagaaacctgtgatacaggaattcaaattcagacacacactgtagtcccagcactttgggaggctgaggcaggcagatagcttgagctcaagagttcaagaccaacctggacaacatggtgaaatttcagctttaccaaaaaaatacaaaaattagccaggcgtggtgtgtgcgcctgtagttccacctacttggaaggctgaggcgggaagatcgcttgagcctagaaggttgacgctgcagtgagctatgattgtatcactgcattccagcctgggcccttgtctcaaaaaaaccccccacgaaacccaaacccccacaaaaatcaaatgcagacacacagagagagatgaggtagggttccagagacaggtagagagaagggaagaaagataaagacacagagagcaaatggaggcacagatagatggagacatagagtcccaaatcccagagggaagaagagagacacagaggagcagagagagatgcagaggaggagggacagtgacatccagccaaagctagatgcagagtcagaggactggaaaggaaattacctccttttgggtgcctccttggtgcctggctccgatttgggggtgctgctgtaccttgcttcacttaagcaccaacagcccttgaaggtagcattgaggaaggcaagagataaggaagacgaggctcagagaggggaagacatttgcctgacattgcacagcctgggagcagcatttgatgctggtctgtttgatgccagagcccatgttctcttcttcaacttatgttggctcgtgaagaccaggagggacagggcagatggggttagggggctactgagtgtgggtcacagaaatagagggaaataatcatgtattcattcaactcatgtgtcctgaacttcccagaagcctggcccttgtggcgtgatgccagagagccagagatgagtcaggaaacaaatttctgagcaagacagatggggcggagggcagtgttcagaggtctggagaaggagcagataaaaaaacagtcggagggaggagacagaaaacacaactggtaggaggatgagtcagagagggcttcctggaggagagggcacttgagcttcttattaaaagatgagggcatttggggacatggggaaaggttggaagagcattccaggcagaagacacagcatatggaaagagtggagacagaaataaggtgggatgtgtgggagggattatttatttatttatttatttatttattattttgtttgagacagagtcttgctttgtcgcccaggctggagtgcagtggcgcgatctcggctcactgcaagctctgcttcccgggctcacgccattctcctgcctcagcctcccaagtagctgggactacaggtgcccgccaccacacccggctaattttttgtattttcagtagagacggggtttcaccgtgttagccaggatggtcttgatctcctgacctcgtgatccgcccgtctcggcctcccaaactgctgggattacaggtgtgagccaccgcgcctggctgcgggagggattatttatataaaataattaataaagggtaggtggagaatgtttggaggggtgaggttgggagagggaggtgaggttagatcatgcagctctttcagtccaggtgaggggctgaaagtttgtctaaggcactggggagccctgggagggccgtgagcagggcaggggcaggtcagttccgggcacagaaagaccactctggagcctcacttgtggggagaggaatgagggcgagagaatggaggatggggcggccaggaggctgggccaggtgtggtggctcacacctgtaatcccagcactttgggaggctgaggtgggaggattgcttgagccccagagtttgagaccagcttgggcaacacggtgagactccatcttaaaaaaaataaatagctgggcgtagtggtgtgggcctgtggtccccattactcgggagactgaggtgggaggattgcttgagcctgggaggtcaaggctgttataccgctgcactccagcctgggggacacagtgagaccctgtctcaaaaacaaacaaacaaaaaaggaggctggggcaagggtcccagcaggagaggacgaggtctgagtggctgctagagctatgggagtagagaggagaggaaggagaggcagaaggaatagaacttggagacagataggctgtgagggtcaggtgtgcctgtggtcaaggcaatcatgtcctccatcccgctgagataaaattgccagctggaaatggaagacagcttgatgggagagaagcagatgtgaagatgccaggagggggtcagggcccccagaactgagtaagactatttcaatctggactgttttaattgctaataacggaaacgcaaatcaaattgacctaagcataaaaggaagtttattgattggatgagggcttcaggcattgctggatccaggtgttccaatcatctccaggaatccaactgtctgtatctttgggctatgcttccctcgtgttgtctttgctctcaggcaagttatctccctgcatggtgatgtggtagcaccgagagctccaaccctggctctgaccagccccaaaaccacaggggaaaaaccctgttttctaacaggtccagcaaaagtccaaaggttgactttgtagcctagattgattcttaagctcgccactgaacaaatcactgaggaaatcaaggtgccaccacctagaacgaatacttagtaagcaggaacaacagacagtccagagaccatctggatgtggagaaagaggaagagaaagagatacaagtaacagagacaaagactgcaaggacagacaaaacaaataagcgaaggtccagcttcctctcccacaattcctgcagagagctctgcagacccagagaaagggatgctgaacaggcacctacacggctagaccccttctctctagcacgagaggccccgtgagaccccagacccagaagtccaggcccccatcctctcctccctcagacccaggagtccagaccccaggccctcctccctcagacccaggaatccaggcccccacccctccccctccctctggaggcaccatggcaaccaggccccctgcccaccatcccctccccactagagaacccactttcgttggaatctcgcctgtttctaaccagttcctggctggggcagggatgagcagagggcaagtgggaacagaaaggggatgacagaggggagggggcctcaagggggcagtggaggcagctaggagaggatagagatggggcaaggagactggtgagaggtgggaagacagagagagggtgacggggttagggagaggcagaaaacgatgaagacaaggagggacgggggcctggggagatgctggggaaactgatggagactgaagagatggagcccaggagagaaggagggaggaggagggcagagaaatcaagcaaaagagtggtggagacgtggggacagaggggaggaggcaggggggcagagagatggggagagaatgaggaagggaggtggagagagaggggtggggaaagggactctaggagacagagagagataggaggaaaaacagggaaatgggaaagaagggattggggcacacagggagtccctgaggtcaggggaacccagatctccacatggtctcagccttccagttcctctgtaattctaccccggggcttcaaagaggaggtagaggaggcagcggtggggagaaggagctggggtgggtggcccaggcagagcctctcttgccaccttcctgagacatccctcacccaccttcccaggatgcagccagaggtggagcccgtgtgcttccctgccatgggcagccccaccatgcacaggaaggcaggtactgagctgtgtctttgggggaaggggtggacttcctccatccaggcagtgcgtagtagcccgggctcacagtgtggccttaagcgagtcactggcactccaaagtgaaagccatccctagcattcctggattcaccagattcctggagagcggcccccttggacctcaaactacatttcccatgagcctctgcagttccttggccaatgccctggactcagaactacatttcccatgagcctctggggcctaagcaacacctctgaggccattcttctcctaggtaacctcactgtcttgtctcccaccctgagctcagcatcttcccccaaagctgctctcctccttcctggtttccattttcaaatggccccaccgccaacccagtcactggtgccatccttccacctcccacaattccctcccacagcccatcaggccctatcttcctgccctctgactctcccttccccattccttcctctctgtccccgcagccctgtcccaggtctcatcctcttccatgtggaccctctcctcacctcctccctggtccccagtttctctcctcctacctatccctccatggctccagagaggtctctctgacttcctgcagtgatcctggctgtcccttgctcataacacttcctagcttcctgtcacctctaggacagagacccaaagctccagcctggcttttgaggccctgtgtggtctgacccctgctgacaacttcaggctcctagcccagcacttcctgctagcactctgtgctgtagcacagctcatgcagttacactcattcaacatttatggagtagtatctcagtgaggatgcatgtaactgcaggtaatagaaaaccaaactcaggactgggtgtggtggctcacgcctataatcccagcactttggaggccgaggtgagtggatcacctgaggtcaggagttcaaggccagccagcctggccaacatggtgaaaccccatctctaaaaatacaaaaattagccaggtgtggtgccgggtgcctgtaatcccagttactagggaggctgaggcaggagaatcgcttgaacccaggaggcagaggctgcagcgagccaagattgtgccactgcactccagcctgggtgatggagggagactctgtctcaaaaaacaaaacaaacaaacaaacaaacaaaaacacccaaaaccaaaactcactgcagccttgagctcctggctcaagtgatcctcccacctcagccttcgaggccgaacaaatgccctgatggcaaaacaggcgttgtttctctgcctttaggtctcttttagtgcttttgaaggcatctttcttttggagaccccacaatgcaccatctctagcctagactgaggcacccacgtgacatgtaatttatatgtagctccagaaaagtcaagtggagttgagtcgaccagttggctagttttgttgatcgacgtttgttcatttcgattttgctgttttctttgcagcgttgtggaaccaatcacattttttagttgatcaggttgcaaacttcagcataggccattagaaagcccctgggtcccaagcattttgcctgtagtgcctaatggatgaaacggcctggcttgttctcatgctgggagaggagacgtgaaacacgccatctcacagatcattcatagcctccaatggcaataagcgctctttagtcttggggctcaagggaattctgggaagttcttgcaggtgactctcttctcttttgctcaaaaaccttggcccatgctaggcccttcatgggaaacatccttctctctgtcacctctttatttggtaaataccttcttattctttaggtctcactgtggacacctcctctagagagccttccctgattgcccctagaccgggagactgggctttccctccaccttgtaacactttcattgaaacacacattgccctttatctgagagttctgaaagggcagaggtgtgtctcattcatctcttggtccccagcatcctccaaggcacacaggggccctctgagatgcctgttaaaaaaatttaaccagctacttgggaggctgagacaggaagatcccttaagcccaggagttcctggctgcagtgagctatgactgcaccatgaccctccaacctgggcaacacagtgagactctgtcaccaaaggaaaaaaaaaaaagcttgaaatggttgcatttcctcaatttttcaataagtacttatttttaagtttatgcttatgttaatttaattacacatatacatttaaatgtattaaatacatttacatatattaaaatcactgttgtaactagaaatagttcttatttctaatgtcatatttcatgagaaactattgtattcacattttttcacatgcatctttgatgctgctagagttactttttgattcatttaacgcttgtacaaggctattttttaaaattaatttattgtgttgagacagggactcactttgtaacctaggctggcatgaattgacaccattgtagctcactgcagcctcaaaatcctgggctcaagcgatcctcctgcctcagcctcccaaagtgccgggatgataggtgtgaaccaccatgcccggcctataattatttttgaatatcatctcatacctagtacatatttaaatttccctaattatctcaaaattgtatttttttatagttggcttgtttaaattagggcccaaacaaagtgcacacatttcaggctttattcaataaatactaaggacaactataagcctggcactttgctagatgctggggacgaaaacacaagtccctgcccttacgttgctcagaagacgtagggaagacagagtgtaattagggaatcatagaaataaaggtaaaattgcaatactatgagtacaaacatactgtgctatgaggaatggcatcagtggaccctcagggagacttgattagccaaatgagggggaagagagatccacgcagagttacagcattggccaagatcctgcagcaggaggggtcagagagtccaagtcgcagaaaaacagcgtttttggactgcagcaggtgaaaaggacgattgtgcttgatcaggtttaagacactagcacggtctgatcacgtgtggtcttatggtcactggaaggactttggactttattcatcccacagacaatgaaaagtcctgggagggttttgaggaaggggccatagggtcaggtctacatgtcaaaatcctgccttgctggggtaactggagagcgagaggagttaggagaccaggtgagagtgaggtgagaggaaggcacctggggagattgagaacacgcacactggatccagatgcttacatttttatccttattctatcattttgtgctgtgtgactttgggcaagtcacttaacctctctgtgcttctgtttcatcatgtgttaaacaacactacctcggaaggttgttgtgaggatgcaatggaaagtattttattctattctattttattttattttggcactagagtcttgctttgtcgcccaggatgcagtgcagtggcacgatcccggctcactgcaatctctgcctccagggttcaagcaattctcctgcctcagcctccggagtacctaagactacaggtgcgcgctaccatgcccgcctaattttttgtatttttagtagagatgggatctcaccatgttggccaggctggtctcgaactcctgagctcagtcaatctgcccactttggcatcccaaagtgctgggattacaggcgtgagctactgtgcccggccacagtggaaagtattttttaaagtgtttggcatataaaagggacagtaagcacatagttatattgttaagtggacagacttgaggaggggatggctgtgtttgagggatggagggaggccggtatgactggaagaaaataatgagggtaggtatttctggaaggggatcccgtgaaaatgtagatttgaatccagtaggtctgggggtgggccctggagtaagtgtctaccgcacgtgtgtgtgtgagagtgtgcaggagagcccgttgtgaaacatataccagcacaccactgactatagttaaaccaagttgaatgtgttgacttattgtaatgagagacagcacacacacacacacacacacacacacacacacacacacacacacacacacacacacacgttgtctcagtagaagggtgttagcaaggacttattgttagagccgggctgtgtcaggtgactttggggagggttcacgggggtggggctttgctctggatgggagactgatggaaagcacaggcaagcccatgactgggaatcttcatctcattgggaaccaggaggggtagatggagctaatgctggggttaatgaaaaagcagccgtcggctctgagctgggagggggggattttggtcatttttgtggtttggacaatgttcatgtttgttgtgttgagacatgattcaggggtggtcttgtttttgtctcagtccatcacggtcacagagtggccttgcttgatgttggtgttacgggaaatgttttatgttcggcaggagagcaccagggccgggctgtcagtgtctgcttccctccctttcagcagctataacaaagacaccccaaaacacaacatcataaagaagacagaagtgtatttcttttcttttctcccttgctcctttcctctctttctccttcttccctccctccatctctctcttttctttctctccctctctttttgtttttgagatggagtctcactctgtcgcccaggctggagtgcagtggcgcaatcttggctcactgcaacctctgcctcctgggttcaagtgattcttctgcctcagcctcccgagtagctgggactacaggcacacaccaacacacccggcttttttgtatttttagtagatggggtttcaccatattggccaggatggtctcgaactcctgacctcgtgatctgcccgcttcagcctcccaaagtgctgggattacaggagtgagccactgcaccaggctccgtccctccctccctcccttccttccttccttccttctctctttctgtctctctttctccctttctctgtcacccaggctgaagtgcattggtacaatcatggctcactgcaacctctaactcctggcctcaagcaatcctcccaccctagcctcctcagtagctgggactacaggcacacaacatcatgcccagataattaaaaatttttttttgtagagatagggtgttgctatgttacctgcctcagctggtcaagaaccagaattgtatttctctcttgtgtaatgaaaggcagggttgtgggacatcttggcttggtgagaagatttagagataagagttcctcccatactgttgcttgccatatctgaacatggtggaggctgggttattgctaatccacattccagtccaagagaaagggcagagtccaagaaaagcagtaatcttttaagcaaatgactccaaagttacacctctcactccagctaacacttcattggtgagagcatggtcacatggccacacttacctgcaagggagtctgggaactgttgtctctagctgggaagccatgtgctgggtaaaactctaggattgtaggggaaggggaaaatggagtgcatggaacaactagcacttggccataagagagagaccagttagctgatggtggggtggtcaaaaagggtccatatttgagaactgttatctgtgaagttccaatcaggagactgattctgagagtgttggaaaaactgaaaactgggctgggcatagtggcttatgcctgtaatcccagcattttgggaggacgaggcaggaggatcacaaggtcatgagattgagatcatcctggctaacacagtgaaaccccgtctctactaaaaatacaaaaattagctgggcgtggtagcgggtgcctgtagtctcagctactcgggaggctgaggcaggagaatggcgtgaacccgggaggcagagcttgcagtgagccgagattgcgccactgcactccagcctgggcgacagaacaagactctgtctcaaaaaaaaaaaacaaaaaacctgaaaactggattcaagtgttgttactgaagtgatgctgccacagtgaagaagtaagcctggggtgactagaagaggaagcaaaaaggagcaagttcctcctgcttcctcctgccttgcaggctcccactggcgcccctgttaggcagagcctaataggaacccagctgttgaaggagaaatgtggttagtagagtctcaacccaggcatcacagagccggtgtcatggggtggagtttggagctaagagacagtaactcaacatctggcatacaagctattctgggtgtggcatgggcaagcaattggtgatggccatttaagcagaatcatggctgaggagggctcagggcagctgacactgggttctctgtcctcaggagccctccttatggacctggagaccccagaggagatgcaggctcggagcctgggcaggcccatcaaatcctcgtgagttgtccctggcccccatgacctctatcttccgcctccccaaatgtgatggcagtgaaccctgacctcagaggtccctgcctgttcgctctctccctagaaagcagtacctgcggcaggtcattgcagagtacgaggcactggaccgagaactcccgtgcatccggaagttccccacaccaccagcttcccagcccctctgcctctgcatggagaccttggtgagtggacctgtgcccttattttctgcacagttttggtggggtgatgggaagggcacaggctgagaagcagtgtggccagagtttaaattcaggcttttggcttataagctgtgggcttgccaccaggacagtttgctgaaaactgattgtgaatttgtcaaagggtcagtcatgaaatctactgctcatgtcagaggggagaccaacgggcaaagaaaggggaggctgaggggggcagggagggaggacaaaaggagtcctactaatccacttctgtaaagtttacaaatataacaaaaactcaagaaaaagcccatgtgtgtcgggtgcggtggctcacgcctgtaatcccagcactttgggaggctgaggtgggtggatcactagaggtcaggagtttgagactagcctggctaacatggtgaaaccccgtctctattaaaaatacaaacattaggcaggcgtggtggcaggtggctggaatcccagctactggggaggctgaggcaggagaatcgcttgaacctgggaggtggaggttgcagtgagccgagatcgtgccactgcactccagcctgggtgacaaagtgagactctgtcaaaaaaaaaaggaaggaagaaagaaagaaagaaggaaggaaggaagggagggagggaaaggaaaggaaaggaaggaagggagggagggaaagaaagaggtcatgtttttgacagattcagtaaactggtcctccctgccttcaatcagaagaggtatatatgagagtcccaggcactcaacaattgactgagaagagctgatgtcaataggtgcttactgtgtgccaggcacaggcctccaaggtaccctctcagctaatccgtgtaactctccaccctgcatacagggattgctgtcctcgttttagggatcagtctccaccccatcactccacttctttgtggctttgagcaagggactctccagcctcccctctcaccccagtcaaggaatgactttctggaagtgacatcatttttcagtgaaatcgtgaaaattttcatttcattttagttcctcagcaattttatgtgctatgacaactgttatcacccttgacatgctaatcacgtgatgcaactgtgtttagtgatcagtccacgtttctgaatgttaaatagattgacaagacatcaaaacccctatgacccttatcttttgactactgaacattcttaaaatgctaatacgaatataaaaggaaaggtgtgtaacttaaatcctggcagaaattttcaagaactttcaggcgcatccattgcaaattgctgggaaagtttttggtagattcgtaaagttggctaagttggtgaatcattcagccaactgttcattgactttggggcaaattggcttggtgagaattgatttttttggagaatgacctagagtgatagtagatgctttcccatctgagagataatctgtcgtctcctttgaccatagcgacagtaccctgggattaagagcgatccttgcccctcaaatgccacctggaactctgtggcaggttctgcaggtggggtctagggtggtgacttctgaacccaaaatgaaccaggaggccacgggctgaggttctctctccgacacccgcagcccgaggaggattttacccacctggaggtgctgcaagccctggaggcccagttaccaggggccatggagagcgggcgcgtgagcagcatccgctttgagaacatgaacgtcatctgtgggactgctgggcgccggaaccggtgagtaagcggcgggggcggggcctggagcgagcgggaggggcggggcccggggcgaccgggtaagagcgtggttggttttagagcgctgagggacgtggccaagagtgaaagcatgaatgggcggggcccggggcgactagataagagcgtggttggtgtaagggtgctgaggggcgggccccggagccactagataagagcgtggttggtgtaagggtgttgtgaggcggggcgacagtggagtgacagcttgggggggcggggccaggagggactagataagagcgagattggtgcagagccactgaggggcggggccaagagtgagcgcggttggaggtaaggtccggtgagatcagagagaaggagggatctcgagtgagtaggggcccgagtttgagtgacccagtagtgaccgggatagaggtctgagcctggaaaggcagctgtgagggggtggaagagactgagcacatagtaggtgtggggccaggggtgatagggtggggacaggcctggagtgcctagggtagagcgcagcctgcagtcgccagtggagggtcgggcctttgggcggtttgagatggagcctcgacagacagtgattaggacgcagaaccaggctaagagagcgtaaggagcctagagcgacccaggcgagagggcagggctggaggggagtttagggacggagcgatggtccgctggaccagggcctgtaaacgactccagggaccaggcagggactcttcgacgatcaaagccagggctgaaacgacctgcgagttccttttccgtccccaccccccttacaggtggctcatcgcggtcacggacttccagacgcgctcgcgcttgctgcgctccgggctcagtccccgcgggcttgcgcaccagatcgtgcgccacgacgacctcctgctgggcgactaccgcctgcacctgcgccgctccctggtccggcggcgcatgctcgaggccctgggggcggagccgaacgaggaggcctgacgcccgggcgggccccggcagcgcttgcgcaccgccccgcgggctggggccacccacccggagccccggaggacagggggcgttgccttcccaggaaggaggcggggccggctcgagggggtggatactgtgagtttaattataaagaatgacctggtacaaaagccatttctctctgcaaaatcttggtggggagtcaggggaagggaggtgatggggggtaggaatgaacccccatgttataatcccgcgtccctaatcttcctccagtccctgtacgtggacgcctgggtcccaatcccttgagggatgaactgaagcccgcgaaagggaagacctgggcaccggggctttcagcgcgtgccgagccctgtctcagcgagaatcagacgtcctcatccgcccccctcctcttcccctcccacccccccttggaagacaattctcgggcttttatttcaggttttttttctggatttttttgtgtgttctaggggttttgtgttttttttttctgttttttatattttcttcttttgttattgttcctctttttgctttttctctcctctccaccccgcgctgtccccgcattcggtccctccccactccccaccccgacctctcctcccccccccaccccctacaccctccccaaccccgcggcacccatccagaatgaacgagcccttgatagacgggcgccgcgcaggccccctgcggactgggggcatccgacaagggggagggggcgggtaggggtccagcgcggcctctgcccctctctcaccacccctcccccctcccacgaccctcccacgaggttccccgcagatccctgacatggtgaggggagggggcttgcagccccctcccctcatggacggagcgcccccccctctcgggggtagggggcagcagagggggaatgggcttggggaaggagggggagctcccttctttggcagctgaacatgggggggggacctgagggcaacgccctcccccctttacccacagcaggggagggggcttttcagggggaggggtggcttaacattcccaagccccgggaataagcggagagaggaagcgtgcgggaaggaacagccatgctggagggagagggagcttcttggagtggacaggttaggagagggcaatcttcgtgcaaaagggatggacagatggcccaggaaagacagaagagggaggatgtgaggaagggtgagggctggaggcagggagaggctcgagtgtggaagcatggtgagcaggaagccagtgtgcatagggtcttctctcaccaggaagagaaagagcttaaggaggtaagagaatccgaatgagaatggccgcaagagctgcttgtcaacaggaataaaaaataagcgtgtcaggaaaagaaatgacagttacagcccaagagtgcatggaatgagatgagtgtgcaaaaggaaagaagtggtagagctctcatccaggtagaaaagacaagatgcggtgtgcagccatgtcatggtgcgcaagaacattattaaaggggagaaacaaggcttccggagagcactgaaaatgctgggggggggggcgcgtgtgcaaaagcaagtgtgcaagagggttcacaaaagaatcaaaaatgcagaagggcaaagatttcaaacagaaaggggcaagggagtgggagcctggcaaagaagaagagaatgagcatgtgtgagagaaacagtttctgggaggcaagtgtgcaaaaggcgtgaccaaaagtgacggtgcaaaaggggcaagagggaaggcggggggtggggggctaggagtgtcatggtgagaggggagagttggggagtggaagaatctggggtttttaagaataagaagggaaagtgcttcaacgtaagaaaatggaggtaagagtgtgtcaggaggggtgcataagatagcaagtgtgcaagggctgagcaaagagcagggcactccagagaatgaatgatgtgcatggagtctgtgagggggagggaaaatgtgtcccaagtgtgtctgcaacaagggtccagagcgagcggggaggaggagatgtgaaatggagtgtgtaaaggagggccctggtaggggaaaagtgtgtaagcagcaagaagcagagaaggaggcatggagcgtgagaaaggaaatgcagcgtgtgcgaggagagcagagtgtatttgagcgggcctcgccagccagaagcaaaggcagaatgtgcaagacagcgagagggcaaatttgtgcaaaattgcagcccggggacgggaggggagagaggtgagcaggcgtgcaacggagcgtgcaagaggctgaggggggcagctgtgtgtgctggggagaggggaaggggggagagctgaggggcctggagagagtgggaagggttgttagaggggtggcaggtggtggaatccgagggcacccccttcccctgcggcctgggggacagtccccatccaatcgggctcagggctgaccctctatggctctgtctatcccctccccccagaataggcccttccctccttctcaattcccctctgtaatttctcctatcccccctccgctccccgcttcacacacacacacacactcttgtgtcagctgccccccttcagtgaggtgcaaatgtccggcctggattgggccacctggtgacctctggccttgggagatgagggcagggcgcagtttgaacagagtccctggcccggggagagaatgacagtcaggggtcagaggtcaagaggccagcaggctcaagagttctgtggacggggctggtccgtccaggccagccatcacctctccaggaagaatttgagagcccggtcgatgttcatgcggtggcccaccctggtcacacctagatcgacgtagtcctccttggtcaaggcgggcaggtgggagccatcgatctcgtggtccaggaactgggctcggtgctccgccaaacccagccactccagccaatcagccacgtcgaacttggtccagaaccccagaggtttagcgccaaacggcttgtccgggggcagcgagagcaggcgggtcggtgagagggagcgcgaggcccctgacaaggctcccccgagccccccggatatccccgggtgtggcggcacaaagactggggcgaaggggtcagccgagcctcctgcccctccagttggggagccacggatgtcaaagaggcctgggtagaggggtccggaaggcaggatgggcagggacgagggcctgggcgcagggctgaccttgtgctccgaggcgggcagcagcgaggggctgggggcccggcggagcagagggggccgcatctcgaactccacgccctggaggtggcgggtggacgtggaggaggaggaggctgagggtgaggtggcccctggggccgcagcggctgtaggggagacccctgttccggtggggagtggcggcagaggtggtttgggccagttctgaaacaggctgctgacaggcttggagaggagtgaggactgggagtcgtcggagagtctggaatgtgacaagggggcagtgggggaggacagggatttagggggcaagggcaggggtgagaaagaggcagaggtcaagatatagggagagaggaggagagacataagggtagggggagagacggaggagagacgggaagaaatggagggagcaaggggtaagacggccggccgtcgaggaaagaaatgaagggagagaaagatgagaggacagggagagggcgacagttaagagagatgaaagaaaaagagacattaagtgataataataataatcgtcaccgcttactgatgctcacgtgtgccaggcattgttctaagtgctttacatgattgcatctcagtttaatccccacgacagccctgatgcaggttactattattatcagcacagagaggttaaataacttgcctaaggacacacaggaagtggcagagcccggttatatggcaccaaagtctgagctcttcaccactattctatactgcctttcaggttatggccagtcgtagcagagtgaaagatggggagacagtgagagagagacaaaaagagggtgagcatccaggggagagagatggaagggacaggggacacagagagagagagatgaagagagggagatgaaagagagaagaaacaaggggagaaaaaggttcccctcatccctttcgttccctcccctccagcactgtcccacctcagggcctttgaactggctgctccccctgcctggctcactcttgccctgggcagctgctccctctccactttcattactctgcccaccttgcctgttacatgagagaccttctccacccatcccattgtggtagctttttttgtaggatggttgcaattattttgtttactgccccgcccccactcctatgtccctagactatgagccctgtggagttgcacagtctttgcctgtcctgtccagcaggggatcccatcacccagaagggcactctgcacacataggtcatgagtcaataattaatgcaattgttgactgaattaagcatccttcctgttgctgctacaagcagtggaaaaaaaaaaaaagaaaagaaaaaaaaaatcctcttctctaaccagaatacttaagaatagtcaaggaattgcattcagttcttaaaggcctaataaacccacatttgtttgtttatttttacagcgtaggagcattgattcaagttgctctaataatatacacttcctttttcttttctttctctctctctctctctttttttttttttttttaagacagggtctcactttgttccccaggctgcagtgccttggtgtcatatcagctcactgcagcctcaaccttccaggctcaagtgatccacccacctcagcctcctgagtagctgggactacagaggcaggccactgtgcccagcctcctttttcttttctttctttttttttttttttcaacctgggagcatagatttaagttgccccaaatatacactccctgaacccacatttgaaggtcagacacatttggatagcagaccttcaaacagaattcaagtgaactctgtagatggacaaggatatttaaaacctgctcccaaccctctgtgtatctgaagcagaaatgtaactctactttctctaggactagaaggtcttgaatgggctcgaattctgcgacgatgcagctgactggctgctctgggaagcatctgcatcatcccgtatttccccacgtagaagttgctgggctcttgttcgaggccccctcttcccccatcccatgttacaacaatggcacacactaaatcctctcaaaaactctttgggctggcactaggccattccacttctacagagaggtggattcatttgcctaagatcacccaggtagaaagtgcagggttgggactggaagctgagaaggtgggctctagaaccacacctataactgcatcctgtcttgaaccacactggcttcaagggactcacagatttcagggactgtcagaaagaagtggcagctcaccaaggaaacaaacataagcaggtctcactccagtctcctttgttaataactttttttttttgagacggagtctcactctgtcacccaggctggagcacagtggtgcaatcttggctcactgcaacctcggcctcccgggttcaagttattctcctgcctcagcctactgaggagctaggactacaggtgcccaccaccatgaccggctaattttttgtattttttttagtagagatggggtttcaccgtgttagccaggatggtctcgatcttctgacctcatgatccacccgcctcagcctcccaaagtgctgggattacaggcgtgaaccaccacgcccagcctgttaataactttttgttcatcatgggatgtaggttgtgatggtgatgggcagagacaacagaagctactgaaataaatggaaatttaaaggctggacccagtggcttacacctgtaatcacactttgggaggtcaaggcaggaggatcacttaagcccaggagtttgaaactagcctggtcaacgtagcttgtctctacaaaaagttaaagaaaaaatggccagggccaggcatgctggctcatgtgtggaatctcagcactttgggagaccgaggtgggatgaatcaccttaggtcaggagttcaagaccagcctggcccacgtggcaaaacccctcatctctactaaaaatacaaaaatttgccgggcatggtggcgggcacctgtaatcgcagctactcaggaggctgaggctggagaatcgtttgaacctgggaggcagaagttgcagtgagctgagattgtaccactgcactccagcctgggcaatagagtgagactctgtctcaaaaaaaaaaaaaaaaaaaaaaaaaagaagaagaaaagaaaaattggccaggcatagtggcgtgcacctatagtcccagaggattgcttgagcccaggagtttgaggctgcaagtgagctatgattacaccactgcactccagccgggtgacagagtgagaccctgtttctaaaaaaaaaaaaaaagccaggcatgttggctcatgcctgtaatcccagcactttgggaggccaaggcggatggatcacctgaggttgggagttcgagaccagcctgaccaacatggagaaaccccatctctactaaaaatacaaaattagctgggtgtggtggcatgggaggctgaggcaggagaatcgcttgaacccgggaggcagaggttgtggtgagccgagatcacgccattgcactccagcctgggcaacaagagtgaaactccctctcaagaaaagaaaagaaaaaaaaaaaaagaaaaagaaaatatttgtgaaagcatgcttctgtgacagcaaactcctgccaacctggtttctgtttcctttctgccaccctgagaccctaaagggacacagccatgccatcaacacctctggcctcccttgttggccaccagcccccgcttacctctgccgctgcagggaggaggtcctctcggggacatagctggctcccccgtggtggctgtctccgcctcccccactgcctcctcgggcccagggcagagcgccgccagctgccgaggagcccccaaactgctgaagcttggagctgagttcactgatgatgctggcttttactgtggccaaggctgaggcctgaggctgggccaagggcccgggcagaggtggtggcggtgggcccgggccctcctcccagggcagcagcttccggggcagagaggaggccgtcggcaagggcaccggtgggacttctggctctacagccaccggaccccccgccacgcctgccgtggggggtcctgaacaagcacgcagggccagcagcccatcggttccagcccctgtcaccgagacggtggggctggtgggggtaacagggtctcggagtcccccgctggggccaggccgcaggcctccgctggctcctagcgcccggccccggagcttagagggagtcatgagctgaggagggtatggcgggccgggagtactgctgcccccaaaggcctggccgtccaggtaggccacataggtgtccagaagctccggcccactggccacaccggccccagccccgcccccaccccctgcgctgccaccaccttcggcagataggctgctcagcgtggaggcgctgctgatggtctccagtgggtggtcactgctgctccgactgtccacctcctcgatgccagaatccgtgccaggcggagggtccgggccaggctgtggggcagcgggagccggtgctgctggggcaggcgggcctggtggatgggggtccccaggagcggcggaggccccctgggtcagggtggccacctcgctgtcataggatgtcaggctggatgcggtggagtccagggtgggaggggctgcggccacagccgggggtggcacagggggtaacggggtggcaggggcaggtgtgtcgggcagcgggtggggaggcccaggcgtgaggggcgactctggcttttcgaagctgttggagaattccagaggcggaggcagcggttccacgaaaaggaattcgccatcttccacatccaccgagggggcgggaggcggcaggaccagcaggggcagcccgttctcttcgctggccctcggggaggtcggggaggggggcacggaccggcgtgggctgggcggcgggacccccggcccgtcctccgaggggggaccccttccgctcgtcacaggggcccggggctggcagttttcaaggaaccgcacgtgcagcggcagccgctcgggttcttcgggggctgcggacctccagggcttgcttactccggggtgcggggccgggggctccgtccccagctgcagcaggaggggccccaccccgggagcggtgggcggcaggcggtgtagcagggaacgccgggcggcgggcgggctggcgggaagggacttctcctggctgcccagcccggccctgtaccccagctcccggcgcgcagggtccggcggggaggccccccagagacgcagcactggctcgtggtgggcgtggggcgagtggtggtgcggggtgggcggcggggcctcgtagcggggcgatgggggcctgggaggcggctggggggccccgccgccctccgaggactccttcagcgctcgctcgcgggcggccagggccagccccagcggggaggcgggatccagggccttgccggtcagcgggtgcaccaggggtcgcgggggcaggaagctggtgaaggcgctgctgcccccgccacccccgtaggctcggctaccggccccgtagccgccgtagcccgcgccgctgcccgcagactccagtcggaggtagggctcggcggagaacatgccctcgtcgatggatttggagtggcgcagccgcgggcccggggccgcccctgtgcccagcccgccgtccccgccgtcctcgtcccccgcgtcggtggacaggaacagcgtggagcgccggcgcgcctcattctgccagcccccctccctccgggccgcccccaccagggcggccccgaactggctcgtgaagtccagcgtggccgggccgctgggcgaggcgggggtgggcacgggcgagggggacgggggcacgggtgacatggccggggcggggctgggcgaggagccgccgccgccgccgcctcccgtgggctccggctgggtggggggctccgcctcggtgctgctgccctggctgctgcggccgctgctactggtggacggggccttgatgatgatggtggggatggggatggagttcttctccgagggcgcggccacggcgggcggcggctgcggggaggccggggacgtgggcgacggcgcgggcgggaggccgccgcccttctggggctcgccttccaccttggtctgcttgaccagcgggcccttgcggccgcggcccgagcgggcgggcacgtacatggctgcgctggccgcccgcgggggcagctggaaatagcgtagagccgggccctgggaggagccgccgcccccgcccgcgctgccgtggtgcgatggggacggggcccccggggtcgggctgggcccgccgcccctccagcctcgcaggctgggctggggccccagagccaggcggggtggagggtcgtcgggagagccgcctgtctccatctcgggaggatgaggggggtgggcgtggtggtggtggggctgagggggcggggcgtggtggtggtggtggtggggcgggtggtggtgggccgggggcaggggcccactgtggtacaggctcttctcgcggctccccacgcgagtgtcgggaggggagggcccgtcaaaggatgcaggggaggaggcggggagggggccaccagagccagggttgaagggccctccccgaggggagggggtgaggcgccctgaggaggaggggactggaggtgtgctgtagggaggctccggtggggacgtggtgggtggcgggggaatgtcctccgaaccaggcacagacaggctgcggctgaatttcatggctgggggtgctaggtaaggtctgtcatcttctgccgcacctggggagatacagaggctcaaggagggggaccctggcggggagggtctccctgctccactatcccatagaaccgcaacaatactaatgacaagaatggcaccccgtatatgccaggaacttcacgtggactcgcccagctcttccctatttgaggtaaacccaaatctgcttcatacagaggtacaggttgtgcactgcacaactgcaaaccgcaaggaaggtgaggaaactgaaattcagcagaacttcctccccacgccaggagggggcgccattttctaattccgttcaaaggctcagtgaacggtttggggccagcaaaagtggctggagctgggaagggatagtcccctcgtgtttatgcatagatgcgtgtttcttttcacgtatatgcgggaaagaaatgcaaccagcacatcaaagctgtgattctacagagagaaccacttatgatgaggctaaagtttaaaagggattggatctataaaaaaaaaaatcaggtaaacgatgcgagccaggtggaccccacactcagtgggagtgtaagactcacactggtggactttgaacgccaggagttggggaaagctgaatccaatcagggaaaaacaactccaggaggcgtgcaggagttaagtctttgcttacttcactgccaaggctcggtctttgaacctcttctcacctctgactactccctctcaactagtgaccagcttcattcactgcctttctgctgtcgacgcccacgtttatgcctggggccccatcctccgccctgagctctgggcccctatattcaaatacccacacccagctggctgtctcacgggcatctcagactccaaacgctccaacccaagctcctgatctcctcaccaacagactcctcccagcccacggtccctccccaccaccgcagcaaacagcagctctgtcctttcaggtgctaagactgaaaaccttgcagccactcttagctttcttcctcaagtcacccacatccaatccaccagcaaatcctgttgtttcaaaacatatccggaatccaatcccttctcacccctccagagtcaacaccctgggccagccactatcatttcctatctggatagcaatagctgtcacctcctctttggtcccccggcttcccagctcatccccttcaatctagtcccttcacagcagccagagggtttctgttaaaaccgaagtcagctcatgtccctcctctgcttagagccctgccattcactcacctcactcagggcaaaggttcaagtcctcaccatgactccccagaccctgcaggatcgggaccctgtccccccactgccctcatgtccagtgctcacttggcccctgctacacaggcctcctccctgttctgtaaacgcaccagactcagcccgacctcaggacctttgcagaggtagttcgctctgcctggaatgcctcaaccccagggagcctcacgattccccacttcatctctaggtgtttttttttcttttctttttttttgagacagagtctcgctctgtcgcccaggctggagtgcaatggtgcgatctttgctcactgcaacctctgcctctcgggttcaagctattctcctgcctcagcctcctgagtagctgggattacaggcacatgccaccacgcttggctaatttttgtatttttagtagaaatggggtttcatcatgttggtcaggctggtcttgaactcctgaccttgtgatccgcctgcctcggcctcccaaagtgctgggattacacgtgtgagccactgtgcctggcccatctataggttttagctcaaacctgcaccctgccccctacccagcactccctatctctcttaccttactccattattttttttcactctttttttttttttttttttttgagacagagggttgctctgtcgcccaggctggagtgcagtggcacgttctcggctcactgcaagctctgccttccgggttcacgccattctcctgcctcagcctcctgagtagctgggactacaggtgcccgccaccacacccggctaattttttgtatttttagtagagatgggattttaccatgttaaccaggatggtctcgatctcctgaccttgtgatctgcctgcctcggcctcccaaagtgctgggattacaggcgtgagccgctgcgcccggcccactcttttttttgttttccatagcacgtacaactgctaacatactagataattttcttgcttattttccttataatccattatctgtcttcccctgctataaggcaagcccatgagggcaggaacctttagtctgttttattcgctgacgtatccccattctagaacaattcctggcatgtggggagcgcttggtaaacacttgtaaaatgaatgaatggatggaatcgggtataagagaaacaaccagaaagctgtagcgggggctttagctcactgcatccccattctccagatgtagagccagaggcccagagaagtcaagccacctgccccagttcacacagctgggaaggaggggagccaggattcatggccaagttcacccatttccaaagcctgaactcttaacccaatttgatgaaactatggtctctctgggagcacagaacatttccaagtctgcttgcttttcctgaactgtcacgttcctggcctcccccagcccccacatctcttcttctgggtggcataccgatagatttttgccggagcatcaacccaggtcctggaggcaggaaagaaggacgctcgtaacttggctgggcacggtggtggggatcgaagctcgactttggagcggcagtcagagggggagagagagaaaagatagagagagatcagtcagcgcagaaaggcttgtggcttcactatacggctgcccccattccttccctaagcccctgccgtaagggagagcagtgtgaagacggtggaaggaggccgggcaacgtggctcacgcctgtaatcccagcactttgggaggctgaggcaggaggatcacctgaggtcaggagttcaagaccagcctggccaacatggcaaaacctcgtctctctactaaaaatacaaaaattagccaggcatggtggcaggcgcctgtaatcccagctactcgggaggctgaggcttgagaatcacttgaacccatgaggtggagaggtggaggctacagtgagccaagatcacaccactgcactccagcctgggcgacagagccagactctgtctcaaaaaaaaaaaaaaaaaaaaaaaaagaaaagaaggcgaaagggaattctgcgggaatgaaaagcctcaagtctgggcaggaaggagaaagaaaggagaagaaagcagattttccatcgactcttgatctgcttccttcctccagccactgcccacatccaggtccccaccagtgttctccgggatggagcagcctcttccctcatctccctgctgccatccttgatcccccaccctgttccagtctgttttccacacaagagtcagaggcatctttcaaaaagcatgctattgcccctgcttgaaatcccatgtcagttaggaggagatcagaggggaccaaactcccaactctggtctacaagaccctctatggcaggcactgctggtgcccctgcagctgccctccccctggatgcagcatcccatccctcacccactgctgggagggtcacctgcctgcagcccttaagaatcaccctccttcagagtcctggactcgcccagtccgttatgtgtccctgcttcctggagcagcccacagcccacgatggacggatacggaggcccgaggcagcactaaagccggggtgcccagcctgaccccatgggttcccactccagcgtgaaccgtgtctgcttgacttccttccacaaccccagccagtctcccacactccctgaaggttcccccgtagcaaacccttggtacaggaatccccacctccggctcccgttctagggaagcccacacgaagacaggtcctgcaggcgggacccagccctgcccccatttcccacttgctcccttggtccacctccacccccacctcttccttctcctctgtcagccccaggtctaccctcattggagaacacctgcgagccctggttctctcggcaacagctttccctcttattgtcacagttccttttcagcgcgaagttctcctcggcgagaccttccccggccccctacccagactgcacttccctctgtcccattttcttcacagcatctctcttccccagaaaccatcttgtttacttgctgtctgtttcctccactagcctagaaactccctgaaggcggggctgatgtatcccaggcatcgcacctacagtgtctagggcccatgatgcttttaggggaagtgttttcatttcttttcaaagtagaagtgaaagaaaaaaagaaaagagaaaattgtaccctggataatatcggtctttgcagcaacaaagtcataaaatttaaacttttttttttttttttgagacagggctggagtgcagtggcgttaacacggctcactgcagccttggcctcccgggcccaagcgatcccaaccccaaccttctgagtagctgggactataggcaggcacaatcacatccagttaatttttaaatttttttgcagaggcgagttcttgctatgttgcccaggctcatctcaaattcctgggctccagcgatcctcccactttggcctccccaaaagttctcagattacaggcatgagccaccgtgttggcctattttttttttttttaatgcagaagggcaaaagtgcctaaggttcatggaagtcattatgaaacctgcctgagggtagggtagtgactttatcagtctcctttcctactgagtccccggtccccgcatagggcctgctgttctacaagcaagtgttagatgagtaacagggagaatcagccaaggtcaggcacttcggggccctgactccccagcttctgccaggtcaccccatgtgtctcccttctccatctttgagaccagaagtgcagagaaagggagccctctcggaatgaagttcgcacctttgggatgaacccttacttcctgcacttcccactataccccctcctgcctctttcctccagccattcacaaccattcccagttccctcgcttctcacttccgagactctgcatggagcatcctttccctgggctctgggctctgcttgggaaagctctgttatcttagccctccaccctggcccggctacccgcttcctttaggcctgcagtgcccccctagagcagccactagccattcaactgtacatttcaggccaacgtggtggctcatgcctgaaatctcaacattagggaggatcgcttgaccccaggaatttgagaccagcctgggcagcatagggagactctgtctctacaaaaataaaaattacaaaaattgctgggcacggtggctcatgcctgtaatcccagcacttcgggaggccaaggtgggcagatcacctgaggtcaggagttcgaaaccagcctggccaacatggtgaaattccacctctactaaaaatacaaaaattagctgggagtggcggcatgtacctgtcatcccagctatacaggaggctgaggcaggagaatcacttgaacccgggaggcggaggttgcagtgagccgagattgtgccactgcactccagcctgggtgatagagcaacactcggtctcaaaaaaaaaaaaaaaaaaaaaaaattaaccaggcatagtagcacatgcctgtcatcttagttacttgggaggctgaggtgggaggatcacctgagtgcaagagttcaaggcttcattgagctatgattgtgccactgcactccagcctggatgacagagtgagactgcgtcattaaagaaacagaccaaccaaaaagacaagtgtaaatttcaattaattaaaattaatttgtaaaattcaatttctctgttgcactggccacatttgaagtattcaacagttacctgtggctggtggctaccaaattggacagtatagatatggaacatttcatcatcacagagagctctattggttctagtccagagtttcctggggtctgtattacatgcctctcactacacttcccttcctgaattgggactgtctgtttctatgtttgtctcattgattcattcattccagaaatatttattgaggacttcctttatgccagggactgtgacagatactgcagatacgacaaattagacaaatgtcccagcccacaggaagggcaagcaggccataaacagcataaattcgtaaaatataacattggtcagatggaggtaagagggaggagagagggagaatgtaatttaaaatatgggctggtgccaggcgcggtggctcacacctttaatcccaacattttgggagttcaaggtgggtggatcatttgaggtcaggagtttgagaccagcctgaccaacatggtgaaaccccatctctactaaaaatacaaaaaaattagctaggcgtggtggtgcatgcctacggtcccagggaggctgaggcaggagaatcacttgaacctgaaggcagaggttgcagttagtcaagatcgtgccactgcactccagcctgggtgacagagcaagacttcatctaaaataaaatagaataaaataagggctggccaggcacagtggctcctgtctgtaatctcagcactctgggaggtgggaggattgcttgatgccaggagttcgagactagcctgggcaacatagcaagaccctgtctcacccccaattttttttttttaattagtggtgcatggtggcatgtgcctgttatcccagctacttgggaggctgaggtgggaggatcccttgagcccatgagtttgaggctgcagtgagctatgatcgtgccactgcactcctgcttgggtaacggaacaagaccttgtctcaaaataaataaaataaggaggtcaaggaaggcctcactgagaaggtattatttgagcaaactcctggaggaggtgaaggagggggcataatgatgtgtagaggaacagtgttccaggcaggtggaacagcaggtgcaaaggccctgaggtgaaggtgagccaggcaggctcaggaggaataggaaggaggccaggagctgaagggtaggagttgaggttagacaggtgatagaagggtgggagtgggtaggacctgcaagtttcaggtttctttcagatttcggctccaaggtctcctctctggagaggcttcctcctgttactctgtcataactcctttaactgatgacagtttggagtcatcatcattatttgcttgcttgtttactgtctgtctccctaggcatgcagcccaccccaatactctttctactctatttccttggtaagaaaatgccaatcttatttggcaccttttgagagactacacttcccagcttcctttgcagctaggtgtggccatatgactaaggaaggccaaccgggatgcccaagtgggagtgttgtgtgttacatctgggatgtcttggaggtaactcaagaggcagcaaggtgccctcttttgcccttctgcctttctgcccttccttgttcctgctacctggaatgctggtgcaatagctagagctccagcagcaattttggactatgaggccagtctgcagttggaaacatggctaagatggtggagcagaaattgagaaggattctgggtctttaagaccatggaggctgctaacctgcctgagacttcctatctcatactttttttttttttttttgagatgggagtctcactgtgtcacccaggctgaagtgcaatggcactatcttggctcactgcaacctccacctcctgggttcaagtgattctcttgcctcagcctcctgagtagctgagactataggttcccaccaccacacccagctaatttttgtatttttagtagagacaggggttcaccatgttgcccaggcttgtcttgaactcctgacctcaggtgacccacccaccttggcctcccaaagtgctgggattacaggtgtgagccactcatgcctggcccccatacttctttaacaagagagagataaaagcatttttcttggtcaagccaccattatttgctttttctccctcaggtgcagcagaacccaattctgctagtctcctctttcaaatgtaaattctctaaaggaagttactttgtttgactgattcactcttataccttgagagcccagcagcaggtccaggatatagtaggtgctcaataaatatttgtagaaggaagaactcattggaagcaatacaagacaccctgacaagatgtggcgagcaactccagggcaaaaccccagcctgttcctctgaacatccccatcaaacagcacagggccagctccaagcaggcttcaggaggtgtcgcctgaaggcatccctgctttgacggatttcctgccatgctgctcttctctaagcgcttctcagcctgctcaatccttctccactttgctgaatgtttttctgaccccctcccccacctccttcagccacagaccaatactctgcttggctttctgtcccgtcctgcagctgtgtggtatcagagagcagaaccttgcaaaagataaaggcagtagagaagtggcaagtggaaggagacactcttgtgtgagccattttacctgctatttttcgtatgtgtcctcactggatcctcacacctgtgagttagggtggattatacccatttggatgataatgaaagaggccgtggatcagagagaaaaggtccttatcctagaccagccagcgagtaaggaggagattcaagatgcatcggagaaaagaggtcagagtggctcaaaaaccctgagataaaatgggaggggtacgaagagccaggagaagggggtgtgaccagtcaggaagcacacggggactgctgaggggcagggctggagaggacagcaagaacagagtccaggcaggagaggacagctgggaggaggggaggaaggcaagggaaacacctgcatggggcacgggggcaggtggtgggggccagagggagaggcgagggtcaggtgacaggtgagggtgaaggtgatgaggcagggatccgagtgacagtggaggggttgatgtgacagtggaagggtcagagtgacagggaagggaccagggtgatgggggagaggtcaggatgacagggaagggtcagggggacagtggagaggtcaatgtgacagagaaggggtcaggtgacagagtaggagtcagagtgatggggaagggtgagggtgacagggtgggggtcagggtgagagaagaggtaaaagagagacagtggaggagtcaaagggaaaacggaggggtcagggtgatggggaaaggtcagggtgatggggaggggtcagggtgatggggaggggtcaagatgatggggaggggtcagggtgtggggaggggtcaggatgatggggaggggtcagggtgtggggaggggtcagggtgatggggaggggtcagggtgtggggaggggtcagggtgtggggaggggtcaagatgatggggaggggtcagggtgatggggaggggtcagggtgtggggaggggtcagggtgtggggaggggtcagggtgatggggaggggtcagggtgatggggaggggtcagggtgatggggaggggtcaagatgatggggaggggtcagggtgatggggaggggtcagggtgtggggaggggtcagggtgatggggaggggtcagggttacaagcattacaggtaaggggtgagggtgatgggggggtgtcagtgtgacggggaggggtcagggttacaggcaaggggtcagggtgacgggagagggcttagagtggcagggaactggttagagtgagggggaggggtgtccccgacagaggagggtgcagagtgacagacgcctcgtcagatttgcaagctgacaaaagacacttcagcaccatgtggaagaagaagggacaaaaatgggttagcttgacataagaagggtcagggtgacaggagagatgtcagactgacggaggaaccataacaatctgatggggcatcgcactgactccccagggagcacctgaactccaccaaccaacgggagcattcgctcccgcgcagaagggacagccaatcagagtgcgcagccttgcatgacgtcactggctgccgggcagactccccttcagtccgccgcccaaaggcccagttctccgtcacctcgtggtctggcgcctcagtggcagcgcatgtcctgccgctgaccagtggctggggaactcctgctaaggaggcagccctgagaggggataggggagagaatggacggggagacaactgaagagacagagatggggggacagagatagacagagacagagagagggagacaaggagacacagagacagacgtagagagacagaaaaagagagacagagatagagagacagagacagacagacaaaggcaaagatggggagagagacagagatggagagacagagacagagacaaaggcagagatagggagacagagatagagagacagagagacaaaggcagagatggggagatagagatggagagacagagagacaatggcagagatgaggagacagagatagagagacaaggagagagctagggagacaaggagacacagagacagagatggagagacagagacaaagagacaaagacagatgggggagagagggaggtggggaaacagggagggatgggaagagaaagatagggagagtgagagaggcgaagagcgacagacagagatggggcctagaagggggagagacaaggactgagagatgagaggggaaatgagagggcgatgggaagcatgggaagcaggaagagcccagagaggaaggagggagggcagctctgactcagagagggcctgcgcagccccaggagggaaccccagaagtggggagtgcaactgagagggagcaatgacgtctcagactgagagatgagggggcacgagggagccctcgggcatcagtggcgggtgacaaagacagtaccagagaaagccaaagccataccgaggggcggatggacagcagagccctaggaggagacagcccaagaggtgccctgacctagggtggatctgctgggctccgcgcccctgctgtccctacctcctctaggttatatgcaaaagtgcatctttggagagggttgaaatctcccagtttccaagtccttagatagtggcatctttttttttttttccccgagacagaatcgcaccctgtcacccaggctggagtgcagtggcgcgatcttggctcactgcaacctctgcctcccaggttcaagcgattctcctgtcccatgctcccgagtagctggaataacaggcgtgcgccaccacacccagcaaatttttgtagttttagtagcgacggggtttcaccttgttggccaggctggtctcaaactcctgacctcaggtgatccacccgccttggcctcccaaagtgctgggattacaggcgtgagccaccacgcctggctgatagtggcgtcttatacaatgctttgctcttgttcacttttgtgcagacctgatccaagaagcctcggggggtactgcaccccccaccccactgcatctagaccagagggaagatgcagggtgaagaggggagaggagcctaaatgaatgggaaatcgagacaccgagaacaagaccagacgtcgagagaggccaccaagatgcagaaacctcatgaaggggcatctgtattgactcagagagcgggaaagataaagatggcaggtgggaaggagcagagaaggcggcagagagagcctccgacatgagagggggacctggagaaggcccagggacagatccaagaggtgagagaagaaaaggcgagggggatgtacagggcaaatgactatgggtcctctggacacagagggaaaggaggtctcccagaactcaggtgagtgcttgtgagtttcatttctaggaggcaggggcaggtgggcagctggttttattactggctggtgtctgggctcctctgggggtggaggtctttggagctcagagggtgagttccctgagggttaggctcttgactgtcctgtaactgggttcgtgcagggtagacctagaactgtggctgcctggcactttacaggagctctgcgcatttgttgaattaatgaaaacaggacttgctctaattagtttatcagagatttacactcagtctgatacgctattgtggggtctctggtgttgcggggtctctggaggcatacacagagatcactggtgagccatggtggactttctagtttattttatttcagtgaattaatttatgtatttattgagacaggtctcattctgttgcccaggctggagctcagtggcgcaagcatggctcactgcagctttgacctcccttgctcgagtgatcctcccacctcggcacacaccatgactggctaatttttaaatattttgtagagacagggtctcactatgttgcccaggctggtctcgaactcctggcctcaagtgatcctcctgccttggcctcccaaagtgttgggattacaggtgtgaaccactgtacctggcctattttcttttccttttttctattttttttttagacggagtctcgctctactgccaggctggagtgcagtggcatgatctcggctcactgtaacctccatctcctgggttcaagtgattctcttgcctcagcctcccaagtagctgggaccacaggtgcacaccaccacgcccagctaatttttgtatttttagtagagacggggtttcactatgtttgccaggatggtcttgatctgttgcccttgtgatctgcctgccttggcctcccaaagtgctgggattataggtgtgtgccactgcgcccggcccagcctggcctgttttctatcctgaggggtttaccttctgttgggagtttgctgtgttacagttaacctcatggaaccctcataagaactgggcaagtttcactttagccccattttaaagaacagaaaactgagatgcagagaaattaagtaacatggtccaaggtggcaaattaagttagaggaagtcaggatttgcatccccatttgtctgttaatatagagtttctgggggatcaggaacaaacagaaacacctggggtatggttagagacccagagagggaaattcagagggaggagagtgtaaaatacagactggggggaggcatgaagaaatgggattagtgggagtacattccagacttccaataaatactgaataatttagtgagtgaatatggatggtagcatcctgaatctaagtccacttaggataatcctggggctgaaaatctttttaatctttttcgtttgtttgttttttagagacagggtggtctctctctgttgcccaggtgggagtgcagtggcacaatcgtggcttactgcagcctcaacctcggaggctcaggtgatcctccctcttcagcccccagagtagctaggactacaggtgcatgccaccacatctgcccaactaattttttgtatttttagtagagatgggatttttgccatgttgcccactctggtctcgaactactaagctccagggatcagccagcctcagccttccaaagtgctgggattataggtgtgagcccctgcgcccggccctgaaaatcttttaaccttagaatgatacagggcagtggttctcaatgagaggtagttttgccccccagaggacgttgggcagtatttgctgctggcatccggatggtagaggccaggggtgctgctgaaatcctacaatgcacaggacaggcttccacaacaaagaattacgcagctccaaatacaggcaattgtggctatatgcagtagttgtgttatatggggttgccacacatttccctcaaccaatcaatacataaccttgttttatgcatgtttctgttgaaggatgccttatttaatatacattgttgattcattcacatccaactcctggccaccagtgctctaactcatgcctgaatgaagcttctctaacatacgtattttctccataaggcacatcacggccttctcgcacttaggaacgctagacagctcttcagcaccatgcttgggggaccttttaaacgctgatatcaccactaaaaggcccaaagatgcaaagcacgtggcactaaacagaccgagaaaagacactcgttcacagtataagagccgaaatgagaaggcaccctcgttcagcctcgtctgggaacccacacatagggctactcaagattttctctgctttgcgcctgtccaagaataaccacaaaagcccttcgcgtattgattctgggcttctaataaatttcagcgagtaggcaaattcgcagacacagaatctgggaatcatgagggccaactgtgtcaacagcgcagatgttagaaactatgacggacaggaagaggtcttggactttggttctgtcttgatgagagacacacttgatgaaaggtctcaggcaagtgaatgcaaatctctaagactgtttcatcttctgtaaaatgggaatgtgcatgctctgtctttctttctgtttctgtaccgccctttccttcttaaagctggttgtgaagaagtttgttgaggaattatgagaagtttgctgcagggcagttgaggatagaagaagatcacaggaggaggaaacagggtcaaaaaaggtaagagcccaggggaggtagatttggactccatataaggaagaaggtttttttttttttgagacagagtttcgcttttgtcgcccaggctggagtgcaatggtgcgatctcggcttactgcaacccccgcctcgcgggttcaagcgattctctcgcctcagcctcctgagtagctgggattacaggcacatgccaccacatccggccaatttttgtatttttagtagagatggggtttctccacgttggtcaggctggtctcgaactcctgacctcaggtgatcagcccacttcagcctcccaaagtgctaggattacaggcgtgagccaccaagcccagcctcctactcttgatttttataaaagtacgagcccctccagagcatgagggattgtggatagacttcaggggcctgtgcacttgtacaggaaaaaaaatcctatgtcttcattttcatcatcctccaacaaaaactcaacctttcctcaattaaatatgtaagcagcaaaccatgctagtttcagcaagacccatgcctgtatccccagtaggaatcacagatatctccatatcccatcacagtggtgcagatttcccaaaatagtgtttatgcgcctcgtgattttgaaattagagttgttaaaatccaccgccaatgtctaacatgttgacaaaaaaagatgatattatgatatcacaaattttgcttttgaaaaatattttgagaaactacattttagtgtaactggcctcttttgttatttcatgttatgcatttataagcattattctgagaaggaccacggcagcctgccaaagagatccatgaccccctaaaagccaaaggacccagttttagagtaaatggacccctgaccactacgtggtggatgcggccagaggatggggactgggcagagaagaaggaagcgggaagggaggagcaaggcagagcgtggcctctggaggagacagttggagggtaaggggtggcactggcaagcctagtgggggatgtgttggagggaaggcacacagcccagtggagtaggggcaacatccaggaagggagcagcaggcccctaccaggatagccagggctgtggcaggaccatgggttcagagggctgcctgcctgggttaaaatcccccctccttccttgagcctcagtttccccctctgtaaatgggctaacaacctcgtgtacctcccaggatgaatctaaggaatgaatgagataatccatataaaatttgatgtctggctggtggctcacgcctgtaatcccggcactttggagggctgaggcgggcagatcacttgaggccaggagtttgagaccagcctggccatgatggcaaaaccctgtctctattaaaaatacaaaaattagccaggcatggtggcacacacctgtaatcccagctactcaggaggctgaggcaggagaatcgcttgaacccggggggcagaggttgcagtgagccaagcttgccccactgcactccagcctgggcgacagagtgagactcagtctcaaaataaataaataaataaataaaaattgaaaaataaaataaaatgcagtgtcccccaaattatcaacaccccctacaggttggcctctggttgtggggagaggcagacagagtggcaacagacatgaccattcatattttaataagtactacgtgttgggtatctattattatgccggggaatctccatccatgacatcattttgccttccttgagacccttaagatgggacgcagagggacacaaagaggcggggcaagagctcaagtataatagcaggggtggaaagtggagagagaaaaggacagagatgggatttgagggaaaggggataaggaggaaaggaggtctccaaagttgggagaaaggaggaaaccctaggatgtgtgtcgcccctccaggaccagcctaaagcacagaggcgtcaggagggttttggaaagagaaaggctccaggttggtgtgtgaaccgcctcccccctggcagttcctccccacaccaggccgcctacctcagtggcaaagaaacctttgggtcggtgtttgcccagggacgcgaggccaccgggaccagggctttcgcttgcactgatggtctgttgagctgcggccaggatttcgtccagtttgtctaggggtagatgaatgaacagaggtgggaagacaatgaaatgaagtttgctttgacccgggccgcaaagaccagagctgccgcccgcagttcatccagcacctggatcaaccaggaaagggcagccctgcctgggtccgggtggacgggcagtcccgcttggagacacaatctcccagcccagtgggcagcacccagggtgggaaggggtgcgggcagggaacggggcagccgtcgggagagggcgggcggagggaggggaggtgggatcgcagcctctctggggcaggaaggtgaggggcgccgtggggttcatggtgggacagggatgcagcgggtgccggggctggggcccggcatcccgaggagcagggctgggccgtcttactgagagccatctgatacacggtccgctttttctccatgctgggcaccggcgccggctgctgctcgtactctgtgggcaaagaacacggatgacgcccagggagcccccgggggcggggcggagcgggctcggcctgtgggcgtggccagcaggtgcgggccagtgggcgtggcgggcgcgagaggggcagtgaggggccggggtcagggaggggcgagtccgccggcggggtcgggagacgggggccctcccgccagtcctgtgcccactcaccactcttcttcttccagggggagactagcccgggggagaggcagtagaggagccaagagttaggacgtcaggggaaggtgaggggccccctgtctggaagcccgcctccctcggggccccggggtgggggcggtcagctgtccgaccagccccctgtcaggggaaatgggacccccaggtccactcggccttgtctggagggaggggctcgctttcctctgttattgggggttggggggagctggtggagggagagatgttgaatggggctggggggtgaggtgggacaaaaggaaggagacagagagacccgcagagagggtacatacagaccctgagagagaccccaacggagaaacagatacaagagcacagaggaaagtcgtctctcagacaccccttcccagagacacacacacacaggccagagtccgacccatggactggggacaggatgaggacaaggacccctggtcactaacaacactaacgaactcaagggatggtccagccctccttcccctctccccccggccccctggcctcagcagccccgcaggctcacccatctcctccagctctgaggtcatagatttggaacgcagggagatggttgggggcggcagccgcttggcctgctggggtgctgaaaaggtgatgaggggaggcatcagtatcatgggggagatgcccccaccaccctctaccaccacagggctcccagggctcagagaatagccattgccagcgtgcggagccctccctgcctcagtttctccccacaagggtcacggagaagcagtgctagggaagggaaggccttgggcagcagcaaccagccctggggctcccgcagggctgagcctggtggcagtggggtggctgcgagagtggccgcaggagcacctttcttgtgcactgcctcatccatgtccgggtgcctggtgaccatcaccaccttcaccatcagcgtgttgcccccttggcggatcatgttcaccacctgtcggtggccgaccttcaccacattctgcccgttcacctgtggcacagacacccccagatcacacagagtagacgaggggaggggtgcttgcagcttcagagaccccaaggaggatgcctcctgcgctgccctgtccatggccctctgggctatgttcctctccctccgacccttcataccaccgcctccctgggcaagccccctttcccaccctccctggccccagggttgggggagaggctcagcctaccctattcacttccccctccctccttgtccccagtatttatttatttatttacttttatttttaaaagacagggtctctctctgtcacccaggttggggtgcagtggcccaatcatggctcactgcaccctcgacttcctgggctcaagcaattctcccacctcagcctccagaatagctgggacctcaggcacacagcaccggctaattttttttttaagagacaggatcttgctatgttgcccaggctggtctcaaactcttgagttcaagcaatccacctgcttcagcctcccaaagcactgggatcacaggcgtgagccgctgtgcctggccatcccccggtattgtgtatgtgttggggacagctctgtgtcactcttttgagatgcctcagaggcctttagatggaatcgctggggaaagcagaggctggctggggggtgggcagggggctgggaatcctggtgccaaaggagaataaaactgggcagccagatcctggtgtgaatcatgagggggtctgggaacttgtcacagggtcccagggaagagagggggcctggactgacctcgatgaggaagtctcccattcgcagtccagctcgccatgccacgccaccctcgtccaccgactccaggtactgcagcgccgggaaggccggggtgggggtgaactcctcgatgggggtctgcgctgcagacagggaggagccggcggggtcggaggggagggggtggagaggccgagcaggggatggggctcagacccaagtcacggaggcctcaccgcagctgagggaccagcaccccggggtggggtggtgggcgggctggggtcccttcccctttccagcccccattttcagccctgcttctggggtcacagagcccttctcccatcccctccccggctggcactcacccttggccccccggagcacgaacccaaacccctcactgtccttcttctgcagcaagactgtcttctccttaatgatgtaatcgctggcagggaggcaggagaaatgggggggtggtggggggagtggagaagacatcatgagacacagaggctgtcccccacccggcaacccagacccaaacctctgctccagggccattaattgcatctcctaggatctctgtcacccactctgtgtgtgtatgctagccctgatgggcttccccctcagagccggcatgctctctctctcactccctctctcctcattcatccatccatgcatccatccacccatccattcagcaccaggcacggtggggaggatggggagaagagcttccagattaccagacagccaggcttgggtccctgctagtcacttcctgcctatgaccttgagcccacaactttaaccttttgtgcctcagttccctcatctataatggggggctatcacagatcctacctgatggggttgcagtgggaatccagtgggggtaatacacatttagtatttcgcacagtgcctggcacatagtaggtgctcaatatgatctgctcgatgtccttaggtcagagtgttaagtcaagaggactcatgtactttgatgatacccctcaaaattcctttatacatatgtcacctcccaggaaccccacacagggtaaaattgctaattctgcactgcccaatatggtggccactaggtgcacgtggctgtttttatgaaagctaatcaaaatcaaatggaaaaattcaattcctcagtcacagtggccatatttccaagtgtgcagaagctgcacatggctggtggccaccacattggacagtacagatatagaacatttccattgctgcaaagctccccgtggacagcactgtcttctgtattccctggtgcatctcaaatggagctactgcatgcagtcagcatattctattatagtaaaatgcaaagcacccatgaatatgggtggtagtttccagtaaagccatcaaatgccaccagcacatttaggtaaggctcacgtacccaggaaatgtcaatgaaactcagatacagttcatggatctcaaggctcactcaaacagccccaaactcctgacatgaccactgtacacctcaggaatatacatccattccattcccagaggatccgacaccccagtctacatcaggaatactcagacaccctggctgcaaccccactgccttcagaatacccaagaacacccaggagtcactggaacgcgtgctctgctgtgctgagcttccttcagcactgtctaaagcctgtcccagggcacacttgtagcacctcccaccctcacaatcccagtgtattccaataatacccagatcccagtaacatccatgtggccctaatacactccaatcatagccaagcatgctccccaattacctgcccccacaaattcagcaaaacagccgtcctcgaatactccagtatgtttcggcaacccccacacatcccagtatgttccaataataactccccctcactcggatctcagtgtattcccataacacgccctctgaacacatacatcccagcaaatgccaataatacttactgtgctccactgtatttaggtaccacccccacaagcacccctgtatgctcccaggacccccatggctccccttgtaaaaatccatacatttgcaccatggcgacagggttctggatgtgcacgtgtcctcccttcctgctgccaccctccttgtggcacctcagtgcacctaacaccacgcatgttcacatgtacatactccagcaacagtcctcgctcaaagttcgtaacagtccagtaaactcatccacaccatacccgccatgtcttcctcccctggatagagaggtgttggcagagaaggagggaaggggctgaaaggggtgaatgagggtaggaaaagggagaggggaagggaggaaaggggccgagaaggccagaacagcaagtggacggggaaactggacacagaaattggctcagaggtcagagctgcctgtttctaaccatgcattctgtaatgtccccattcccaccttcttactcctcctcctgtatctcttccaggtctccaaggccccccagcagccagcagcacccttcctcactggaggcaacctcactttctttcactcatgccacaaacccctcccttcctccatctttctccctcccctctggaatctctcttgccccctcatcagcctcataccccatacataagccttccccaaatgtcagccaatatagtcaataaaactcccatatcaatatgccaagaaggagcacttgccattggctgggcagtatctgaagcccttcacagatagatcattaaattgtcttctcataaccagcctctggggcagggataagtaccagttctactttatctatgtatttattcatattttttgagacagaatctcactctcttgcccaggctggagtgcagtggcacaattatagctcactgcagcctcaaactcctgagctcaaaggatcttccaacttcagcttcccaagtacctaggactacaggtgcttgccaccatggccaactaattaaaaaaatctttttttttggtagagatgggggtctcactatctttcccacgctggtcttgaactcctagacttaagcaggcctcccacctcagcctcccaaagtgttgggattacaggcatgagttgccacacccagccctagtttcactttataggtgaggaaacagaggcacagaaaggttaagtaacttgtccaaggtcacacagtgagtatcattcttcaacaatacccaagagaatactcgggtaactgcagtggtaataccctccactccacagcaccgaaataccttgagcacatatatccatctgctcggaatccaccctgagctcggccctgcagcacctggagtttatcccagggtgtggcagtaacaccatgacaatgaggaacacttatcgaattattactgaatgccagccatgattccaagcactttgcatttatatatttccatttatgtattcagttagtcctcacaacaacccagggaagggttgactgttattcttcccattttataaatggggaaaccgaggcacagagaaataacttgctcaagatgacaccagctagaaaaatgtcaaagccaagatttgaattcaccagatatatatatatatatacacacacacaccagtggtgatctgaggcagggaggggggtccaaccacatccagacccaccctgttcctgcttctgcttctcaaccaccccctatcctacacatgctccattcccctctctgctccatgactccctcacccaatccccagctaggacatacgtggtgttgccctcatcccaccacagtctccttgaacttcccaactgctctcttgctcccacagctccatgtacctctaaactccctctccccaactcctgtgtacccctcctctctgcacctcactccctactcctccatgccatgttgaggttccacatcgccctaacccacccccctcatccctgactcccacaagccctcctcacaccctatggagccatccccccatttcccgtgtcccctgacacaccctacccccctttccccctaaacatcctcctcagacctctgtgacctcctcacccttgtcctgcgacctctccctcatcctttggcctcacccttcccacaccctcctgcacctccgtaagtaatctcactggctcccctaaagtacctctggtccctttcatacttcctgggtaccctcttttgcatccgtggaaacctccacctatttctgccccctcgactcacttcaccacatgccctcccgcctgcatttactggcagctgcgtttcatttacattccctgtgtcctcttggtattctccccctactgcccaaatccccacccccaaatacccccccacattccctgaattccctccccaccccatttctctgctccgaaccctcggtgctccagccgccacccctcccccacttcagtgtccccactctcccctgttccattctcaaccctgcacctcctacccagacccctctagtccctcccccttgccccccatcttggctgcccctgcagcaccccattcaggctccctctggctgactacctgccctgcaggagcccacacaatgcttttccccaggccatccctaagcgaccctgagcggcctccagagctcagcagccagctcttgttcactggatcccacacacaggggcactgcagcggcctgcactcccctccccaccccaacgtccctctcacacacccagggtccgccagcccagagcctgctgctgtgcacgggcgcacccccaaccccgcactcagccccttcccacgtacccgtgtccatggcctgcccagaggccaccacagagggacgccagcccccctccccatgctgagaagtggcacacacaagcggatgcggctccccatgcagctcagccggggctcagcacacgtgccccacatgggcagagggcagagccagtgactcaagtactcctgacatgcacagacccccgggggcaagggggcaggggagaggagcacatggggacagagacacaggatggacccttgaagtaggggcctgtgggggaggggtaggccaggcccaggagggtgggtgttgggaagcacagccgcagtccctgggacagacccactccagcacacaccacacacacacacacacacacacacacacacacacacacacacagtcccagacagcctcgctgtcgctccaagtcatacagagacagacgctgtcacacagggacacacagatggacacagttggggggtgggctgggagcccaccatctctccatttctctctctcacacacacacgcacacacacgcacgcggctgcaggcagtcacacacacgcacatcgacacagccacactgacacacgcaccgtcgcacagtgacacgcagcggaaaaagaggaggggaggggaagccgggggcgggatgcgtgtgtgatggaggggggatgactgtgaatgggagagaggggtatgaatggggggacttgccaacaccgtgaagaggtgtggggatgtggggatcagagggacaggggcctgggatgtaggcggatgcgggtaagccacggtggctccccacagggagggctccggggaatgggggcgctaagggcggcagaaaggcgagtgggctccaaatcctggaggggggtcggtttagggggcctgctgggaggaaggtcttgggggaagagcagaggggggcctggaagggcctgtgagggggtggaggaaaagattcccagggctgacgagtgcgtattaggggggagggtcggggagaggattccagggaggaagatggagaggagaagggttgagaccaggggcccgaaagggatttcgggctgagagaaggttagggaagaggagcggaggggaaggggcgggttgggggaaggggaaaggccctggggctggggtttagcggcgggggagggtcgccaccgcgggccggggcctgccggccggcccgcaaagcaggaggcggcgcgctccgttacctgtagatgtaccagacgctgcgccgccggggccccagggctggccagctggaggacagcgcggggggcggctgcggcagggagctcccaccggggccgcccccgagacccccgccgccgaccgcagacaaagccatcgccgccgcggccccagccccggcccgggtcccggtgccggccgcccccgccgccgccgccgccgccgcgtccccgtacccgctcggccgaacccccgtgtccgggcccccaggccccgcctcatgctgacccgcgccgggaggggggagggggagggggcgcgcaccccctcccgcgggagggagggcagggccgggggctcacatgccggggggcgcgggggcgcggggcgcggggtcgggccgcggcggtagcgcgaggaccgcggacggcgccggcttcagcaccgcggacagctccggaggcgggcggcgggcgcgaggcttaaccccttggcgtcctgcgccgggcggcggagggggccgggcaggggggagggggccgggaggggaacgcgggggcccccttggcgggagaagggggaggggcgaggcttggaggggggaggagaaggggaggcacttccggtctgggcccccccttaatccccctcccccctccagagccctcccgcgcaggtgcagagctagagagcgcggggagagggaggcacaacatcacacaagatgcctcgcagccgcgtgcacggacgcgcggacggagccccgcttccccggcagggacaccgcgggtgagagaggccccaggcggggacacgcagcccaccaccacagaccaacacgcaacgcacctcgacacagtcggcaagaaaggccaggacattcagactgggccccaaggccatgagcaacacccctcccccaccagagaagcccaggcggaggggcgaacacaccaccacagctccccgagagagcgtggaccccgagccagcgcggggagggggcggcacacgccaggaggggagacacacggaaggaccgcccagctccggcagggaggctggggttgggccctggctgccgggcgcacggcacagcacaggccaggccagcgcagacagggtccgggaagagcggggaggcaggaggaggggaagctgagacgcaccacacacacagcagcacgtgggagccagcgagaggcacggaggagtaggggaggaagcccattgacaagacagagtagaaggaggaagctgagggtgacggggaccacccgcattcagctggtaggacaagtgacccccacagacggaggccaaggagagacccagagagacactggtagacaagaagcagaggccgacatagaagctcggggtgtgggggggtgtaccccaatactcacccggtgcccagagcaggagacgcgccaggcaaacacgcacaacggtcaagcgcctcagacactcggggcgcagggtggcaccccagccccaccctctctccccatgttgccatttctctgtcccccccatccccgacccatccccactggccagaacacagacacgtaggtttggacacatttaatggaaggatgctacgcacaaggggactcttccctggattggggggagcagtggaggagagtgtcatattttagacaccaaattatgaccctccctcccccacagccctgtccttctggaggcccaagccctggaatcctcccctcctctgcccttccctcccccaacatcccaggtcctgaatctcagatcaatcagacagacgcacatgcatgcacacacgttaatgtgcgagtacacacgcacagtgacatgcacagagagggacggatgtgtgcagagacccacctgtccatgtgtgtgagcagactcactgacatgccctgtggtgcttgcccacggattcagagaagcacagatgtgcagagccagccccacagtcatcatagccacaaaggcaccagtatatacagagcagggcagaccctccagccccgggcataggtacaggtacatccaggccacacatgcacacagatgcgtgtcatgcacacctacagagacacacgttcacacaccaagaaacctcagctctggtcgtgcacacacgttcacacgccccccaggcaccccgtccttcccctcctgaccccatcccctccctgcccctcgcctctcacctccctgggccaatcccatccattaagcttccgaagcaagtcagccagcagccagggaggggaaaggtgtcagtgcacccatctcctcaccccaatcccacccagccctgactgcaccctccccacaccggtgcatgggacacacacattcccactgcacatgactgcacagagatggggcacatgaaggagacaagggcctccagccagccagacataagagcgccccggcccccccaggcatccccaccctgccctgaccaccccgttgtctctggctaccccagagctgggcagtcttagtggctgccgaagatggtttggggttgggctgtactgtctgaagctaattctggcttatcccacccctggatcaaacttgagaaggaacagattagaaagggggcttagaggtgatggaaatatttaaaggtgtacattgtgaagggaacttggggtgaggggggttgcccgagggtgtaaggacatttaccttggggcatcaaagctgtcgtaggagcccacggtataatgccggaagagtctctttgccttgtcactgcggctttctgcagggtgacaacagacaaccttggactcttgttttggaaaccacaatcccagccctagagctcctggcccaagtcttcccatctacctcccagtaccccacccccattaggaagggaaaggagtggacgtgggaatcctagggtccattgaacactgctgggggttccgcattaccttgcttgctctcctgagagcgattcgccacttcttccaggcagtcagaggggaaccagccaacacgacctttgacctggccttcccagaagcctccttccccgatgctaagtactggatggggaacggggacatagagacatttctgtgtttctgtgctgcccctcaactgccaacacactcaacttagagcattcccacagttaccagctcctggcccaaggccatccttaataaacatctgaggaaggggcgaggagcttgggggagacccatatcatatcactcttgcattctagtttctggatccaataaggatgacaggcattggggaagacgactgttccataacatggtcttcctaggttagaggcaggtccacaattggtccttgtctcccctggtaactggtcacagctcagttgtgtaattccccttcaccctcctaggctctgtggacttagatcacggatggggcgacaagttctacctcaccctcccatcactgtccctgccacctcccaaagtctccttgccacttaatctttagtcctttgtccccagacccctgtctctgtctctctcggcctctcctggctctagaagggaaaagagattagcatcacctctttccttctctccctctcccctaatggaagcggcttccccctgcccaccctcccaggccccaccgcttccccatttagcaaacatcacagactgcctgttacatgcctgctgctgaaaaacagagatatatgacaagaacagctaatgcgtatccaactctcacctgggccagaaccctaagaggggccactttcattatcccccttttactgataggaacactgaggcttggagagccaagatcatttgctgaaggttacaaggctagtaactgacagatctggatttgaacacagctcagtctgcttccagagggcatactttcagtcactcatgtgcgctacctctccatgcaacggcttcagtgcatgacaagggcaccagtggcaaacacatggtcttccatttctccggcatttttcatgactctgcccccattcagcccttcacatagtttccttcctcgttcaacccttgtgcctacccaggtaggtaacaactgtttttccattttatagacaaagaagctgaagcgaatgtggagaaaacccttgcctggagatggctccagctatgctaggggttgagttggggccatcagatgtattcccctccacaaactgcctcccttgagagcatctggggagaccaaatgaggggaagctgaaagtcatggaagagagcaggagatgggttgtcaaggggactgggttcttggctggtactgccatgcctggcttggtggtcttgtaatcaatcatttgttcactgtaaaaatatttagttagtgccagtcatgagtcaggtaccagggtagacactgttgaatataatcaatgttgttccttcctttgaggagcttccagagcagtggccaatagaggcataactatacaagtgactgtatgattggaagttggggtcagagctcaagggaaaataagagggtgtttggagagaagccagatgggagtatataacttataatggcaaaggggtccagggaggtgtccctgaggtgtgacacataggttgagacctgaaggatcctaggagctggggaggcaaagagagcatggaagagttccaggcagaaggaccagcatgtttgaagagtttggtgtacaagaaagcttgggacattggaggaatggaggggttggtatatcggaggactggagaattggagggctcagggcattgggggattggaaggcttggggcattggaggaatggaggggttggtagcactggggaactggaaggcttgggcactgggaggattggatggcttgggccattgggggaatggagggcttggggctttgggagattggagggattggggcattagaggattagagggtttggggcattggaggattggagggctcggggcattggaggattggagggctcggggcattggaggattggagggctcggggcattggaggattggagggctcggggcattggaggattggagggctcggggcattggaggattggagggatcggggcattggagggttggaaggctcggggcattggaggattggagggctcggggcattggagggttggaaggctcagggcattggaggattggagggatcggggcattgggggattggagggctcggggcattggagggttggaaggctcgggttggaaggctcgggcactggaagattggagggcttggggcattgggagattggaggactcggggcattggaggattagagggtttggggcattggagaattggagggctcggggcattgggagagtggaggactcggggcattggaggattggagggctcggggcattggaggattgaagggctcggggcattggaggattggagggctcggggcataggaggattggagagctcagggcattgggagattggaggacttggggcattggagaattggagggcttggggcattggaggactggagagtaggatgaggtccctggaaccttgtgggtgaaaggaagagtcgcatgagatgaggttgacaaggtgggcagagaggcagcttggaggccaggtgaagactctgggctgtgattctgagagtagcaggagtcagctccctcatcaggctgtgtgaagctcagtgacatcgtggatgtgggtgtgctttgaggcaattaagtccctcttaatggaagacgaggatataaaaacagaaggcagtgtgttctctccctgcgtagaagcattgagcttgtagctcagcaagatactgcccatggtcctctgcctgcccggaaggtcctttacctctggcctcagctcacctttcttttctcccatctcccccaaccccacgtgcctacatcccaggcagctggccctgaaggagctgcacctggcccccacagtagctcctgaatttgatcattcattcactcaacatatgtgcattaaagcctcctgtgtgctgggtcattaaactgagccctagagacccagagaccagtgacttatgacctcacctacaggaactcaggctatgggaagagagactaggaaacacatgcagttacacagcccacctgatgttctgacccccgaatacccttcaaggcctcactcaagttgaccttctatggtaggatcctccctgcttattcaggggcccaggtctctctcctctaagtgcctgaagtaggggccacttaggaaaatgatggctttttttttttttttttttgagatggagtttcactcttgtcagccaggtgtgatcttggctcactgcaacctccgcctcccgggttcaagcaattttcctgcctcggcctctcaagtagctgggattacaagtgcgtgccaccacacctggctaattttttttttttttttgtatttttagtagagatggggattcaccatgttggccaggctggtctcaaactcctgatctcaggtgatccaccctcctcggcctccgaaagtgctgggattacaggtgtgagccaccttgtccggccaaatgatggctcttatatggcacttgttatgtaggaaacattggtctaagtactttacatgatctgactcctccaatcctcatcaaagtcccattttacagatgaagaaactgaggcccagagaaatcacttggctgaggtcaccctgctaggaagtggtggggtctggatttgaacccaggctgccaggctctcaacctctataccgctcagctcctgggcagcctagagtctggcaaagaattgttccaatgcctcgtattaacggccacacctgcggcacgtggtggtctctaaagcatccttctatccaagaacacgtcagcagccctgcaaagcctataagcaggggagactggctccactttccagatgaaggtggaaaaaccaaagggaggtgaaccctgataacagcaccaccattttgggaaccctcgccacggccaaacatcttatatctgccagctcgtcggggccctagaagtaggtccctgcctgtctctcagttgaggacccctggacagatgcaggaggcaaagttaaggctgctcggcctcacgctctgcaccaggtggcaggaaggactgtgggcttggactgaggaccttgggcaagtggcttcacctgtgtgaggttctgttccttcaaccatgcaatggggcccatgacctccctccccagaaagggccatcaggagtctaatgagacgatttggtgagaagttccagccatgccctgcacacggcatcagtgtcccgcagtgggacacggctcacttcactgcctcctgacagggtcatctgagctacactctatggtcctccaagcctcaaggggtgtcctggggctctctgaggtctccagagtgcatgagatactccaggtgcccgagaatggtctgctctctgctccacattttccctgatcgcccccacagcccagcccagcccaggccctgcttccaccctgggtacctttgatcttctcgcccttgctcagggagatctccccctcggcttgggcctggtaggacttcacagccatgaaggagcgtccgggtaccgctgagtagagcttcctccgcctcccgcggctgcccagggagcccccggggccccctgagccccccgtgcccccggctggcccttcccggggtgtcccgctggagctgcgtacacagagggcatgagaggaggggagggtggagggaggggacacctctgggaggacaggggtccttgggtgggggaagaggacggtgcatcaggggggagggggggtttcccagcactggcgtcctccaaggaagagggcatttgggggctccctctgcctgcccgcagctgccccaaccagccccctctcctgcctcctggcttccggctctgccccctcccacggtcctgcgcgcaccgcctgattcagcttcctgaggctgagctgggactgtgtcatccctccgctcacgagccttccgcgactcccagcttcctcctgggtcaggtccaactcctctgcccgccgttgccagcctctcccccacttcctcgggacacgcctggctggccttcgcctccttctcaccctcctctagccaggtgggcttcctgaccccggaatgtcccccgccccttcctcatcctccctccagagtgacctctctgtccccctcaagtccctgccaccccccccatcctcttcctgttcagcttccctccacctcaccctgtcattctgtctgtccccaggggctggggcccatgtttctttggggtaccctctgcctggggcccctgtcctggagcagacatccagctaacatgtggtgcaccgggggtggagtcgggacagtagctcccaaggccttgctttaccccaaggtgacactagggacttggatgagggcctacagaggaaggcagctgggctggcctcgggggaagccgccgatctggagaggggatttgacggggctggggactgtggagccagggctgcctcccctacctgggccggcctcggggctgcctcttggcgtcctcagggtgcctccctcgggatggagagcgggccctggcaccccgggggctgctggcacttcggagggtcccgctgctgagcttggtggtgggggccgagggctgcgactggccctgggaccctgaggtagggccaggggccccagaggacgcggcccccggggcggagaacaccatccagtcgggcagcgccatgctggtgtcactgttggcccgcagcagcgccgggggcaccgtcagccctgtgcctgggggcccccgtcgccgggccgcgtacttgggggactcctggaagggcactgagagggcacagtggcggcggggggcagatgttaggggagaaaaggcaagcagggggccatgcgggggcaagagatggtgggagagaggcatgagggagaaagacagagatgagaaagggaggggggcctggaattgctcccccaccaccatccagacatttttggtcctctagggttttctccatcctatcctggcccccaagtcaggtcccccaactcccccatcccaccatgaaacctcaaccgccccaggttctctgtgcagtccgagctccctgtcactcacccacatcctgttctcggtggtttcggatcagctcccccagctcaaaattcccagcaatcactgccacctggagggagggggtagaggcaggtcggccaggggggcccaggcagcagagagagggcagggaacgtggcgaggtccctggcccgacccaaaccttccactccgacaatgccgccctctgtcttcttccagctccccctccacggcctgtctccttgctttcctcattgtccccttccttatccactgggtgtcactgtcaccctttccttagccctggaaactccagcacatcccctgcagccccagacctggaagggggtctgtccgttgttgttcttcacatccttgtcggcacctcgatacaggaggatcctggcacaggtctcctgcgggtaatggccagtggcacaggacaaagagagagagaaaaaattaagatcaccatgagtggatgcaggttctgtgctaagagcctcaggaataaatactccaccctaaacccgcaccactgaggacagcagccacctgccaggtacggaccaggagcactttagtttaaacgtggccggcccaaacggagatgcaccatgcatgcgaactacacactggatttcaaggatatgccatatgaaaacaagaaagaatttaaatgtctatagccaggcgtggtggctcaagcctgtaatcctaagactgtgggaggccaaggcaggagttccagaccagcctgggtgacatagtgagacgccccccgtctctacaaaaaaataaacagaaattagccaggcaggtggtgggtgcctggagtcccgaatacttgggaggctgaggtgggaggatcgcttgagctcaggagttggaggctgcagtgagctgagatcaagcctgagtgacagagcagggacctgtctcccccccagaaaaaaaaaatgtcaggtgtggtgacacacacctgtaatcccagcactttggaaggctgaggtgagtggatcacttgaggccaggtatttgagcccagcctggccaacatggtgaaaccccgtctctatcagaaaatacaaaaattagccaggcgtggtggtgggcgtgtgtaatcccagctactcaggaggctgaggtgggagaatcacttgaacccaggaggtggaggttgcagtgagccgagatcctgccactgcactccagcctgggtgacagagtgagactctgtctcaaaaaaaaataataatttctgtattgattctatgttgaaatgataatgttttagatacactgttataagtaaaatatgttgttaaaataaatgtcacctaattattttccccttctctttaacatggccactaggatatttgagggcatttagggtatgtgctcatgctatgttccactggatgttggggccggataatcctttggtgattcattggtttgtggagggtgttctgagccctgtgggatgttgagtagcatccccggtctctaccactagatgccagtagcactcccctccccagtcatgacaaccaaaaatgtctctagacattgccaagtgtcccctgggagacagaagctcccaggttgagaaccacaggtctagaccttacggaggcttaccatgttacgtgccaggcgcttggcactttagaggcagaagctcattgaattgcccaacaattccaggacatggaaattgtctctattttacagaggaggaaactaaggctttcaaaagagcccaaggtgggccaggggtggtggctcactcctgtaatcccagcactttgggaagccgaggagggaggatcgcttgagcccaggagtttgagaccagcctgggcaacatggcgaaaccccgtctgtacagaaaattttaaaaaattagcctggcttggtggcacacgcctgtagtcccaactacttgtggggctgaggtgagaggatcacttgagcccaagaggtcgaggctgcaaagatccttgttcatgccactgcactccagtctgggtgacaaagtgagaccctgtctcaaaaaaaagggggggttgggggggctcaaggtcacacagctggtgattatcagccttggattcgaacccagatctctctgactccaaagtcttctatcttaatcacactttctgccaggcccagaaggaaggggacacacattgtggaggaaagggtgggggcaggactgggccagtggggacagggatgccttctacattcagatcaatttctcaccggtgtcaatcacatggcacccatcatcactttttgggctaagcacaaagtccatgccacggcctaggagggttagggttagctgagctaacctgagctgcctgccctgccactccccaccctgaccctcaccaacttcatcttctaccacctgcccttgctcccaggctgcagccacactggccacctccttcctctgacagcacactaatgccccaggacctttgcacggctgctccctctgcttggaatcctttcccgctagatctcagcatagcttgcttcctcacttcgttcaggcttttgcacaaatgccgcctcttcagagaggtcttctctggccatcctgtctaaaaaaaaaacccttgtcctcttccttgctttatttttatttatttatttatttttaaaatttttttgagatggagtttcgctcttgtcacccaggctggagtgcagtgacacgatctcggctcactgcaacctctgcctcccaggttcaagcgattctcctgcctcagcctcccaagtagctgagattacaggcacccaccaccatgtctggctaatttttgtatttttagtagagacagggtttccccatgttgtccaggctggtctcgaactcccaacctcaggtgatccgcctgccttggcttcccaaagtgctgggataacaggcatgagccaccgtgctcaaccctttgctttattttttagtaccacactgatgtatgtgccaggcactctaagccaatgttaactcattttcttcgtaaccccgtctcactgaaattccatttcctgttatttgtctcagtagtgtctcttctcctctacaccataagttgtacaggggcatgattttgcctgtggcacccaccacctggattaatgctggacccacagggactattcggtagaaggagtgtcctctcccttttatcttggcctggccaaacccaacttggcctccagctcaactctaccccagcgccctctgatgctaatttaaccaccatttcccaagcacctccttgatcttaccccttccacatgacaaatccaccaaggggtttgtatgggcctatgttacaggacaggttcagagagggcagatgctacgcccagggccacacaaccagttagtggagcagttaggattccaacaacctggccttcttcttcctttttttttttttttgagacagagtctcgctctgttgccaggctggagtgcagtggcgtgatctcggctcactgcagcctccaccttttgggctcaagcaatcctcctgtgcacctggccttctgatcctatggttcacctatctcctatgaatggacgactctgactgccaaagtcacacatcgggcagcagagttagcccagtgtgtgttctgggtgtgtttgggagtgtgtgtgtgcatgtgagtctgtgtatgcccgtgctgctggccaactagactgttaactcctgccatgtgtacttttgcgtgtttttcttttcttttcttttcttttcttttcttttcttttcttttcttttcttttcttttcttttcttttcttttcttttcttttcttttgagatggagtctcactctgttacccaggctggagtgcaatggcgcgatctcagctcactacaacctctgcttcctgagttcaggcaattctctgcctcagcctcccaagtagctgggattacaggtgcccgccaccatgcctggctaatttttgtctttttagtagagacagggtttcaccatcttggccagacttgtcttgaactcctgacctcgtgatccgcctgcttcagcctcccaaagtgctgggattacaggtgtgaggcaccgcgcctggctttttgcatgttttcacagccccaacacccacactgggggcacagggccagagcacagcccctaaggtcacctgctcctcatcctactcttacaaagctgagaaggtgtgcaagtcagagttgatggctccctcccctgggcaccaagagaaactcgcatttaacggcatcctagcacttatctcatgtcgtagccatgatttgcttacacgtctgcctcctcaccagactgtgaactcccaccccccccaaccccgccctcgccctccccaggccagatgctgtgtctgattcatctcacatccccaaggcctggtgctgtgcacatagtaggtgctcaaggaacgtgcatggaaaggatgaggatggaggatgtggggttgagtcagtcaaaattcatttgttcgagtcattcattcattggttgagtcattcagtctgttgaaacaagcaaacacctgttgaatgctctgagccaggcactgtgcacagtcttggtggaaatccaagagggctgaccccatcattcattcactcattttcattcattcattcactcactcaacaaagatggaactaggcctgctgtttgctggggtcctggaacagagcaagtaatcagactcaacccccacccttgaggtgctcacagcctagacacggatctgacattcaccaccaaatgctagacgggcatatcaggaggccaaggcggcagaggctgaggaaaaactgtcagactcagccctggctcttggaaagcttaaagcctgggaggaagacaaggggggaaatggaggaatcaagttcgtatgtgttatgcatcggtttgttaagcccatggcaaaggcaagcaaacctattaacccacttgatccttttgcatggtagatatttatttatttatttttttgagacggagtctcgctctatcacccaggctggagtgcagtggcatgatcttggctcactgcaaactccgcctcccgggttcacgccattctcctgtctcagcctcccgagtagctgggactacaggcgcccgccaccacgcctggctaacttttttttgcatttttagtagagacgggatttcagcgtgttagccaggatggtctcaatctcctgacctagtgatccgcccgcctcggcctcccaaagtgctggaattacaggcgtgagccactgcgcccggcctgcatggtagatattaattattgacccatttcacagctgagaaaggagatcaaggaggggaaaatgacttgtgcaactgtcccactaagaaaactctgcctgctgtctaattctaatttttttttttaaggcagggtctcactctgtcacccaggctggagtgcagtggcatgatcatagctcactgcagcctccacctcccaggctcaagcaatccttctgcctcagctgcccgagcagctgggacttcaggtgcatgccactgtgcccagctaatttttgtattttttcatagagaccaggttttcccacgttgcccaggctggtctcgaactcctgggctcaagccatcctcctgccttagcctcccaaagtgttgggattacaggcatgagccaccgtgcctggtctaattctctataccaaaatttctctgtttatctgaacggtacagtttctgtctctcgactggaccctgactgacactggtgatggtaacaatgacaattattattctgatggctgccttccagggatgagcacttagtatacacgatggctcaccctcgtcaataagagctggcgttattcccatttcaggaagaaggatggagcctcaaagagggggagggacttgtttgctccccacccccatctgcctgtggggccagggcttcttccccatcagctgcacgagggcctgggagtcagaggattggttgtgaggcctgtgtcgcagagcaggagacaggagcacgtggggagagaagtgccggcaccatgttggttcggtttgacaaacactgagtcttccctgggctccaggcatactgctggctgccacaaggcggcacgtggccacccgccaaatccccagcactgcaagttctgccgaggcagagggggctgagggctgttttggaagacttcctggaggaagggggctgacagaccagctctgtcatgctagcgcctgtctctctaagtacccccaccagctgcccttcaagggcaggaagcatcaagaaacaggtggggagattgaggctttccatggggctgacctgcccaggatcatctgcagctcaggtggctaaagtaccagaggtcatgacattgaaagacccggctcttgccaaccagctgccacgagcccccctgcctgctccgtacctctcctctcctaggaactccagaagtgggggtgttcttcccatctcccttcagcactcccttcctgctcagggacccaggttgtcaggacccccaaggtcctgaattgctaaaactcccatcccactgtcattcccttcaggggccacgggggctgcacgttggcctttcccctgtgccctgccgtgccgccacgtggcacctgcacacaccactggctgaatgcagacacaggggaactgaggacccacagccccctttcctctggctttctgcacaggctgtgcccccaccctggagcacccctttctcctcttttctactcctgctcatcttaacactgggggcacctcctccaggaagccaccttcacccccagccactccatcccaagcccagtcccagatgtgggctcccgcagggatctggattccctgtgactttgctctgagcactctggactgtagcagcaaactatgttgtctgccctctgctaggccatgagctcaacactttgtccccagcacccagctccaggcctgatacagaggagctcagtaaatatctgttggatggatggatggatggatggatggatggatggaggaatgaatggaggaatgactggatgaaagggtggaaatagtgaagaagtggagggtgcagagatgcagtcaagaggagtgtctgagcttggccctgggggaggcggctatcggggatgtgaggggcctggggtggccgctgctaggcagaccttgttgtagagggcgcagatgtgcagagccgtgttccccgaggcgttctgggctccaggctcagccccgtagaaaagcagatgctccaggtgctgagagtgaccccgctggcaggcctgggcaggacagggagcgaggggcatggatcagacccaggctgttctccctctgggccaagagtctgtctatgacctgtgcactggccttctcatcctatcgttcaccgcatccacctccccatcaccttttagccccgcttcctgctctgggacccaggctgtcagcctcaaaacccaaatgttcagtcattccaaggcccaggcgtctggtctgcctccttaagggggtcaagaggacagcccatccctctcaggggtcaaggcatcaggttccccagcctatgcccccttagggtctttctgccttcacccccaccatttcctctttggggaccatgttattctcacccccatgctctgtgaggaccctggcatctggttcccagccccagccccttggatgcctcagggactgggtcccccaccccagcccttcatggcctgaatcaggagcacctggtggatttcctgccagccgttctcatcagctatgcccagctgggccctgttgaacaggagcagctcgcagcatcgggggtcaccacccaccatggccgtgtggaacagaggggtcagcccccgacggtccttgtagttgggggaacccccaaggtccaggagcgcctaggaacggagagagaacccagtagaaaaacacagatgacagtcacacattaaccagctcattctgaagggccagggggactggaccgtcctgggtgacctacagtggccaatgacagtctcagttctgccgtgatgcccttgtgcaaccttgagcctggccctttccctccctgggccactctgattccgtgtgaacaatgtgggacttgggtagatgcctccagaggacacttgcactctgacatcccacccagccttccccctgggggcgatcttggatgagccattgaaagacattaggggccacagtacccacccattccacttcctacaggtgggttgttggggacaagtgagaggacagagtctggatgctggagggtctctgaccaagtgggaggtgttattaggtccaggatctcaaagaaggggcacagcaggaagccaggggacaggtaagcttgggtaagggcaaggatcgggccggcctcactggggctggaggccacttcctgcccccacttgaaggacagctctgggtgtggaaggctggcaataatgaacattaataggagaaagtcttggcagcaacctcgtgtgaggacagcctgtagcagtgccacccaacagaacgtttcccccatcatggggatggtctgcaactgcaccaccctatatggcaggcacgtgtgggcccctgagcacttgaacgtggctagtgagcctgaggaactgaaattttaattttacttcattctatttaatttaaatttaaacagccccaggtggccagtggctactggcttggatagcgcaggtctggaggctgggaggggcgtgtgtgagcaggatgtgggtttgggggtgagtgtgcatgggagatacatgaagaggatctgttaactccaggggtatactgcagatctttgtggctggcatctgactgcattaggggctcttcaggaaagcatctgagggagagaagggaggggccgtttagctggagcagctgtgcgtcggggtgcttctcaatggctgtctttgggggcagcccatcctgaccctcatgtgaagagcaatcaggtgtcctggcgggggcagggggagaagagtattttaaaattagactgtgcagctgccgctgtgtatgtattttgtgggtgtatgggtttgtctatttgggaaagtgcatttgaggctgtgtacgtggggaaggggctgtatttgcatgtgagagaggagggaggggagctggtgcagtgctggtttggaagggtagctggggggctgttttcagggtgtgtgtggaggggctctatctgggggcatagcagggagctcacttcgtattttaaggaatgagaagggtttacaccttggggagacagaggcagatttggtattaagctgggccacaggggatggagacgttctgggtgtttaggggaggaggccgtgcccgggtctgtgtgatgtcagctatagcccaggtgggtgcatctggggggcctgacaagggtgacaataggggctgtgtctcagtctatggaaaggggctttgaactggggacatgagagggcctatttttaactgaaaccaaagaactgaggtttgagaaagaacaaagggaaaaggagagagggccccatggcggggatggggggtccccgaagcctcaccgtgagtgccaggcagtgtcgggcgcatgcggccttatgcagtgcggtcatgccatcccgggcccggaagtcaatgtgggccccgcccaggcacagggttcgaatcacctctacagagccttcggtctgggccgccagtgtcaagggggtctctgaagggcgggaaaagctggtcacatgaagccccttctcctcccctccatcccttcccattttccaggctctgcagctctccaccccacagcctctggccccgtggcctcccccttggacagcaatgtgtttgggagacaccagtcaggaatggatgtgaatgcagatggcacccctgctccccagctctgtcctggccctgaggtcctcctgatgcgcacccctccctacctcccgaatccgagtcatggtaattggggtccagccccttgtccagcagccgcgccaccttgtcagatgtcccgagctgcacatactccaggaacttcttcaaccccgtctgagccatgggcaaagagagagaagacaggacagtcaggagcaaggcagagaagcagggtcctcaagcagcgacgtccagtgaaaatatacgtggagtcacatacgccattgaaaagcttctagcagcctcctttacagagaaaatacccagccctttgggaggccgaggcgggaggatcacttgggcccaggggttcgagaccagcctgagcaacaaagtgagacccttatctctacaaaaaatgcaaaaaactagccaggttgtggtggcacacgcctgtagtcccagctactcgggaggctgagctggaaggatcctttgaaccctgaaaggttgaggctgcagtgagccatgattgcaccactgcagcccgggtgacagagcaagaccccgtctcaaaaaaaaaaaaaaaaaaaatcagggtggttgggggtgaagtgttagttgtgttgaaattcgtgttaatgatatatgttatttaactgatatagctacaatgttactgtttcaacaggtaattgagatgaaaattattaatgaggttatttaacttttttttggtactaagtctttgaaacccagtgtgtatttcacactcacagcgagtcttagttgggaccaaacacactgcaagcactcaggagccacacttggccagtggttcccaaagtggaccgtgaaagtctggagggatggaacatttaggggaggaaagagttcaatgcatgctgtggtggggagagggtagacaaggagggactgggagtttttccttctcaaggatcaagagttcttcatttctgaccaaagcagttcccgatttcctcccagctctcaccatcgagacacaggacagacaggggctgaggactggcgggcaaggtaccaggaggacagatatggctggaaaggggggtgtaatggttggattttgcagagattcaggctatgaggttgggagaaatgtagcctgtctttgaaatagactctaggcagaaggaccttcagtgtcagggtcctaggccaaggtggggaagtaaagaggccttggatggatatggggggaggcaggggaagagaagggagactcaaaggaggccaggtgggaatgatgtgggcccaggcagagggatgaagggcaaaagaggaaagtaagaaggggttgtgatggggataatggggggtatttgtggttgtctcaaatgtggtacagcatcccaagttaagcgggggcagtggccagagggatcgctggcttggggaatgtggaggtctattgggaagaggtggggagagaaagtggttgggtagggggctccagtggtagggggctataggggatagatgccagcagggttttctcaccttcgtgtgcaacttggccagctgcttctcatccaggttggtctgtttgtaaactcgggtcttgtatcggaactgaggtcaagggtagggtagtgagagagacacagagacttggaatcaggggcctggggagaaggcttggggtaggggaaggtctgatccccttctaattccccggggtagctcagggtgggagtgaaaacagccctggaaccttggtctaggcggtagatgggtggcagtggcttttccgacagtgctgggtattatggtatatgtgcactgcaacccctgccttgaaggaggaggagtctggaccccacagggaatgttctagagtgcctactgtaattgggaatcctcccccaatttgatgggtgaggagaagcttggggcaggaaagtgacttggccaaggccacttagctggtcagaagcagaacagatggtaatttgaactcaggactctctgacttccctgtgatgcttagaaggtctggactcgcacactgggtgccccctcgttaaggtttcgagtgtgttaaaaagtgggtggggggcagatgtgttttagggcatgccttctcttatcagtgaaggagttggggaagcttcacctccaggtaggggacccccttctcaaaggactgggggtactcccgcagcagcctctcctcctccaggaagttggcatcgcggccggaggtggccggttggaacaggccatagttgagcacatcctgcaggctctcgctcagggcacagagcacctgctgcttggccgtccagatggtggcatcggggttgaagcgaaggcatttctggttggggaagagataggggctagggtgggccaggggccagaggagagcctgaggtgggttgggaagtgagccaggagctgagtgtgggggtgattcctgggaggatacccagcaccagtggactccccatgtcggttggggcactgtccctctcctgccgctggccagtgggcaggtactcactgtctggtgcaggtccgggatgccaatcctgaagaccatcatgctgaagtgggcgtcgtctgggacggacattgagcggccctggaggcctctaacagaggccaggctaccaggtgccccactgccctggccccgggtcccccgggggcctcgacctggcccgtctggggagctgtcggactctgagcccccctcgggacactcgctggcactgtggcgttcctcgtcctcgcttgtcgcggggctgtgggtcattgtggggccacggggcgacgggggacggcagcatcacaggcggctgcaggggccaagggcggccatcagactaggagcccgggacccctcagaggccgcaggcgctattcggtggtcaagcggtcaagggcagcctacccccactgcccaagataggcaggaaggaggctggacacaccctcggcctgcacggcctcccctgccgcctcctcccacgctggcacgcacacacccctgtccctgacatgcttctggcatgtgtctccttccctgcccttggccccgcttgcagcccgccccctgcgccccactttgctggtgacccagcgtggccgtgtcccagaaaccgcagaatcaccgcgggagctactggcccactttgccaggccacagaaaatgcagctaaaattagctaaggacagacaggtggacaaactgacaggcatcctgccctcctggccccagcctggcccctcatcccagggccggggggtggggttggggagaagctgaggctgacactgagatgtagtaagggggagagggaggtgtggtgagcctggagcgggtggagctggtgacttcactcaagtgtggctgacaacgcgtggcatgccgaatagtgctggggaatctgccgtcccaggggagcaaggggcactgagatgggggtgtcatgggcagagcatttggcctagggtgtccccaagggaaccacaagaggtggcttttggagactggggcatcttgagagggtgtgcgggtaggtggggaggtcggcctggggagtgctgtccaggtgacagtggtgtggtggcccgggtagatgtgggtggctgcagatgacctgtagctcttttctaggactgcagggtgggtgggctggcttgctgggtactaggggctccactctgaggactgggggtgttaggagggaggctaagaagtgagaggagggtctggggaactgagtgggggatcatctctagatccttgctgttctcccttgaggtggccttatgagggtggagccccttccaaatggggtccgcctcccttctgttctcccccaactcccaccccagcaccggaaaccagaatgtctggtctggtccctccccccaacaccaggcccggttcctgcaccgttgccatggagatgggaagcagtggagggtactgctgactttgggggagtggggatgggctggggggttgggaaagggaagactaaatgtgtgtggtgggaggagagttccaggaggtgtgggcgagcgagcctctaacccagggccggcggacccctcccccacgcgcggcagcgctgcgaagccccctccccctccaggtacccagccacgccgccccacctcgtccctgcggagaccccggctgcctcctccctgccccgccgcacagcccacctcgcgatctggggcccgcagacactccccctcggctgaccctggctgacccccagcctcaaccccgctcggagggggtggccggtgggatgaaagaaaagctggctagggccccccgcgcgtacggctgccccagcccccccgggccggctccggcccctccccctcagggctcgcgggagggagcgggcacgctccgccggggcggcatgaatcaaacgctccgcggctaagaatagctggcacgcagctggtaccgagacgggctgaggaatcggcgaggggggtggtggaggacgcgagagagggggtgccctgggaggctgtggggggacagggggcggctggcgtggccgagagcggggccggggagaatgaatggaggcggagggaggcggggaggggcggggagagagagccggagccgaggctgggaaactggtgggggagaacccggccggggagaggggcggggggcaccggggagcaggagtcgggggcgggagccgagggggcgcgccggccggcggtgtagggactggagacctggtggggacgcagggagcttggacaggggtggaaagggactggaggagcctggaaggagaagcgggagctggaggggtcgaaaggggcggaggaggcccgggcctagaccctcgctggaggggagtggggaccagggtgacctggcggaggggcccaggtacgccagggagggcgaggcgggggagtggccgggctgggcggggaggcgggtaccaggaccgagcccttggccccggagagccgggaggcgggttcgggataggggctctgctggccgggggtggggggcgcgccctcccatcaaggatgcgatctgggacggggcaccggggacccgggcgtaacccaatttggtgtcgcccagggcaacgctccccacctcacccgtacccccagccgcacacccaggccaggagcccggcgccgggccaaggacatccggggcgccctcgccccctcccgcggccccggccccgcagctgccccaaacccccaggttctcgacccccttacctgcctggcggggctgctgagtcccggtcggcggcgcccgcggcccctcccccctccccccaccccccacccccccggagacggggaccctcaggccatgccccaccgccccggagggcgagcgggcccggggagggggcgggcggggaccgggggggagggcgggagggccgaggacctcaccccccccgcgggccgggcctggccatccgcagagcgcccccccttccgccgcggccgccgcgcccctcctcgcccgcccccggctcggtccggccggctccgggcgccgcgtctccgcctgctcttcctcctcctcttcctcgggccgccgccgccgccgcccgctccgcgcctcctctgccacccttctcgctctctcgctctcgctgtctctccctcaccctgtctctctccctccctctctccctccctcccctccctccgccctctcccctccctccgggagccggcggaggagacatcgcccctccccgcgcccccaaacctcgcccatcccccaccaccgccggctccgccccctacccttgccctcccccaccactcctccccacctccgagtccccaaatcctgactccgcccctgcttgctcccataccccgaggaaggggtcctgcccccataaggtgcccccccacacacacctcaggaccaccccctcccagagagctccccgccgccctacacagagtggggcacaataaatatttgttgccagactctacacccccaaatttaagtgtgaaggctatagattcccaccctgtccccccaaacacacacacaccctttccatttaagcactgggtcagggcacacgtggacatacctgggccaggccacatttccccaaggcacaggtgcatagtcaccagctgtaacggcacctgcagagtccccacatacacacactctccagcgcatgcatgcccagacacaatgcacctggggtacacagctacaaacacacccagctacatgcagttgtcacacccctgtgcccgggcacacacgcagcacatgcacacatttgcccaccacacacgcacgtgcgcgcgcacacacgcacacaggcgttcaccccggtatgcatgcccagatctctcaacaccaaaacggagttacagcactgtagagacgtgtgcacgccttcccatcacacccacccaccgtgctgtccattgcactggctcgcactcacccgtttacatgcccaacaccgtgccatccttcccctccaggatagttactgctgacattcctggagcactttctgtgtgccaggctcagggactttcgccatccccattttccagagggggaaaccaaggaacagagaggctaagtaacttgcccaaggtcatccagctgtaaggaggtggtaacaaggatcaggaacaggtaggctggctccaaagtcctcacttgacaactatggtgcactactgggcatatcccctcatagttgcatatccttattcatcacacacagacacacccaaccgtctcctcagagtttgcacatgtctgtgtaggcacgcatatgcagccagctgcaggcagacagctcattcatgcctgggacgcacccacagggacagagcagatcccacagggcagcagtgagtggtgagtgtccccttagcccaggcttcctcattctcccagctccaacagcacctccagggcctgcagggggcagttctaggcagcttctgggttcccctccagctgcaggctctccggggtacccgagtatgagctggaggaggtgcctgctcagcctggggaggcctctatcttgatgcgtacccactagcccaggtggtgagcagctgggcccggggaaagcacagctgcccatgttggctccagcagccagagaggctgtgcacccctgcacactttacaaggcctttccccacatacgcattatttcttgaggtctgtagctcctggtgaggggccccaggttcccgatgggcacctgagaggcccaggctctgaggcagggagcagtctgcccaaggtcacagtgccctcgatgtaccaggatttcttggaaaacggaaggctggaggcactgatttccaaggcccctcctggggctcccggcagccgagggcagatgccctgctcttggagccagaaaccttggctagctgccgccacactggtgacctccagcaggctatgctgtttcagagcctcggtctcctcctttgaagagcaggcccagtgatccttggctggtgtgccccatgcttgttggcaccaccagccaggcctgggcgggaaaagccctgcatgactcatgggcctgacatagaggggcatggcatggcattgttcttccttgcctccaagcctctctcccactgccctcaccacctctacctaccctgccaccaccaccctgggaacttgggtgccagcaaaccaaagaggtgaagcttccaggcctttgaccccaccaggaacggctaccctctcgcccactcaacaggttgattgaacacctactatgtgctaggtaggccttgtgctaggagatgcatcagtgcataaaaatccctgctttcattggcagggaacagacataaacaaacaagatcatgccagtcttgattataccaaaaagatgaaatggggcattttaataaagtaacttgcggaatagataaggtggttggggaagacctcctggagctgagacctcgatgatgagaaggagctggggaaagaggcttctagaaggaggaaagggctagtgcaaatgctctgaggttgtaatcagcttagtatttggggatgagccaagaggccagggaaggtggaggctgggggtgggtgaagggaatgggggtgatgaggctgcagaggtgcaaagggttcttccttcccagcccccagcatggtaggctgcgctgaggactgaggcccgggcttggcttccctcctgcttatgatgggaaggtgggggagcaggggagtggggagtgatgtgatctgatttatggtttggaaggattgctttggctgcggcaagcagccgggattggaggggctcaggaggaaggagggggagggcgagactgcagtggtccaggctgaaatgaggtggcttgctgaatgctcagagctccttgagcacacaacctagcgtctgtcgatttcacctcctggagaaaccttccctgactgctccgccagactcctcaccctctcccatctccagccccctcatccccggagctatctggctgctggtctgcaagcagctggagtccccagcatcacccagcccacagcctggcctgcaggaggcttctagtaaagtggccaattaatccccgagccccgtcttccagggtcatgcacacagtcacacgcgtgctcttcacatgtgtcaccctgcccccacacacactcacttggatctccagacaagggcttggagggtaggatgggcaatctagggggcaggaggggccctggagtctcctccattgagtgtgcaggcgatggtggccacagggtaataacaacctcagcgagaccctgaggtctgcccctccttaggaatggccaggcagggaagaagggagcagtgctcggtcccagcatcccaccactgccgagatggttctgagcgggttcctgggctgaggccggggcctgtgttttccaagattccttggagagccagctccatcctcttcctgattatctgatctttgggctacagcagaaggaaagagcagggcggaagcgagctctggaaagtggaaagaggagggtgtgcgaggagacccaaggcgggatctaggctttggaacgttggaggtttccggccacagaggcagggcctccggggagccaagaggggcggggagagacacacacagagaagcagaggagaccaacggaccggacagagacgaggagaggaacaggaagagagaagctgggagaatcgggaacctgggggctagtgacctgcacacagggcaggggcactcggcagttcccagaggccacccctcccaccccagacatccagacatctggaactttgggtgccaagagtccagcttaatgcaggcagcctggcttttgggggctttggtggtcccccagctcttgggctttggccatggggctcggggagcagagagggagtgggagggaggctggggaggtgcccaggaggaggagcgggagagggaggccctgatgctgaaggtgagctctggagtgtcagggagctatgggtggtgaactgtgggtctgggagggggtattgcaaggttagggaaatggacaatgaggagcgattgggatagtctcagaggagtgggagggtgatgggctcagagacaggactcaggcagcagagaatgagttatgagttggaaaggggtgaatggggcatcttggtggcaggctggggctcaccacccctcccctgccccagcatctgcaggaagccctaggactgcctgctgggaggggggatgagaatcctgccggaactgttgagggaaaagaggactgggagatggaggaggaccagggggaggaagaggaggaggaagcaacgccaaccccatcctccggccccagcccctctcccacccctgaggacatcgtcacttacatccgtgagtaaccagaagccctcacccccaaactcctaggccgccgcggtcactttcgcaaaaatgaagggtcggttcactgccaagtggcctttcagttgtccattgcccagcccagagcccccacacccctaggagccccaggtccacggccatgcctcctaaaggcctgggccactcgaccctaccttccaggagtccggggtgccccccccaccgccaccccgccctcaggagccctagatcccagttctccaggtcctcaggccccccgctgcatctccaggctccccctccagcatgatccctgtctgtccgcagtgggccgcctggccggcctggacgcaggcctgcaccagctgcacgtccgtctgcacgcgttggacacccgcgtggtcgagctgacccaggggctgcggcagctgcggaacgcggcaggcgacacccgcgatgccgtgcaagccctgcaggaggcgcagggtcgcgccgagcgcgagcacggccgcttggagggtgagtccgcggcgcgcggggtggaaaaaaatgagactatctgggccaggaatgggactggttgagaaggtgaccctaggtgtccggggcgggagagttcgggagagctgctgtgtgctagcggacggggttagagagctgggaggctgaatgcagggagcgggtgggcactccagacccgcgcggacccgactggggcagcaccacgccccctacagtccagctcccaccgcctggccccgcccctggcggaccagactctccacctcctggctcccgcggttctgaccacgcctcctcccagccctccccatgagttcctggccccgcctccctccacccccggatgttttgtcctcgcccccttccagactctgaatgcatgaccccgcctccttctctacccggccccgcccacaggctgcctgaaggggctgcgcctgggccacaagtgcttcctgctctcgcgcgacttcgaagctcaggcggcggcgcaggcgcggtgcacggcgcggggcgggagcctggcgcagccggcagaccgccagcagatggaggcgctcactcggtacctgcgcgcggcgctcgctccctacaactggcccgtgtggctgggcgtgcacgatcggcgcgccgagggcctctacctcttcgaaaacggccagcgcgtgtccttcttcgcctggcatcgctcaccccgccccgagctcggcgcccagcccagcgcctcgccgcatccgctcagcccggaccagcccaacggtggcacgctcgagaactgcgtggcgcaggcctctgacgacggctcctggtgggaccacgactgccagcggcgtctctactacgtctgcgagttccccttctagcggggccggtaccccgcctccctgcccatcccaccacccggcctttccctgcgccgtgcccaccctcctccggaatctcccttcccttcctggccacgaatggcagcgtcctccccgacccccagtctgggcgcttctgggagggctcttgcggtgccggcactcctccttgttagtgtctttccttgaaggggcgggcaccaggctaggtccggtgccaataaatccttgtggaatctgacttgaggggcagtgaaggcagtcttggactttatctcctgcaggggaagccgggaagggccagaccctggtctttgggcgcgtgtcctggcctttggatgcctgttctgctttttacagatgtcatttgagccccagatggagtgatggagaaacacaggtgcatatgtacacacggtcatctgttctgtgcacagatggccggagtacacgcgtacaaacgctgtagacaccttcacctccatcgtgccctctctctcggcctttgggacccagggcctgccagttgtcccaggccttggtcttggtcctggtcaaagagatttgggaaacgtgaaggggctaaaggctctgacaagtccggcaggaaagagcccgtttaatttgtttaagtggcgtgtccaatttgtttccccagatgatatggtttcatggacttgttgggatgatatattgagacatggacttaaggactcacccaaccctgaagcttagacttcctcccaattttccctcctctgcttcctgccagtgaggccaggagccagtcccttcccctctgtgagcctcgggtttttcatctgaacgtgggcacaatccctcctactttgtgcggctcttgggatgttcaggtgagaccaggacagtgtgcatttggtggtggctgaacttgagccacacactaccttccgtcctcacctttttttttccttttttgagacacggtcttgctctttcgcccaggctggagtgcagtggtacaatcatggcttactgcagcctcaatcttctgggttcaagcagtcctcccaccttagccccccaagtagctgggactacaggcacgccccaccacacctggctaatttttgtatttttttatagaggttggttttcgccacgttgctcaggctggtcttgaactcctgagctcaagcaatctgccctcctgggcctcccaaagggctgggaatacaggcatgagccacagtgcctggctctccctcaccatttttcatacctttactccctgggggcagtgaagacacccaggagtccgccagccggggcctcagcatagtggccagctctgtctagaggagaggctctttggaaatcaccctagtacctcccccaaggttggcatcatgggcgtgaccctgacatcagggagcctaggaatggggatgtgaccctgtctgtccttaccactctgccccttcccttccttcagccattgcaccactgcctaaagggtgaccattggatccacacatgggaggagcaagccatcactgtcagcttggatagaggggagatcacccacccttctcccttcaggagacatttctcagccccacatccccagaggaatacagaataggagagtgggggtgtggcctggagtcagccttccatcagaaattcttctcatgctgagcttcagtttccccggggagggataggcagccctagatcttatagccaaccagaggtcagattaggcagacaatgatgagtatctattatttcccagaggggtctctgccctggcagagcttccattctggaaagtatttgggcatggtacaccatggctacccgcccagattctagagccagatggcccaggttccaatcctacctcagccacttatctcctgggagaacctgagtgagacataaccttgctacttctcagtgtctccatctgtactgtggggataataacagtattgatctagaatagtaccagacacagaggggtctttgcagttcccagatctgagcttcaccagggcaattcaacctcaccttcatctctctgtactctctcctgacactgtgcttttgtatatgcaaagatctccatcctccctcctctctagggtaaacacccacttccaagaattggataacacatcaccccaacaaccagcccttcccccagccccttgcggggttagggatcccctttggtatccacaaaccccttgttcctctcttgacccagccctgatcagacaggctgagggacactccaggtgcgtgggggagggcaggacaaggtatgactatctctgtccccagcatcgcctggcatatgggagccctttgaatgaagatgcttgtgtggcatcatgcaggggaccctgagatgagtcggatctcggctgcttttcctccctggcctccccaaggctgggtgaggcaccttctctagtttcccgtagggtccagggctttccacatcactttaggtgccactgtctggtctgacagacaatgtctgtctccctggcagggcctggagctatcataccaagcacagggccagctgtgggcatgcagagagagaggtctgaagtggggagtggcgtgcctgcaaggacggtttatgcatcagaacagcacgcctatatgtggcattcggcgctgattcctgactctggtctgcgtgggaaacctactctctcctccaggaagcccccccagacttcctgcgggccagagtttgccaatgtcctctccctggctctctgcggagcgctggtagtgtgcaaggccagagccatggaccaggggaggcctcggcagctgattggaatagatgcattaagggatcccagggaagtagtagaacaagggcaggaggcctgggatgattcgacggaggaggaagaaccagcggccgcacgggcttgcagggcgataaagcccaggaggccgagcagcaggcgcatcaccgccttaccagcaccacgtttttccgcagtaaccggatgactcctacgggtcacctcgcaagccccgccccctcctcccatgtgaggttcgcctgcctttccccgcaagcctgagggccacgccttggcggtgaggtcggagctccgcagtctccaatcagagctcagacccctcctctccacccaggcctcgccccgaggtactctggaaaatgtagtcctgtcacgcgcccacgggtaggaaaaccccaagtcgcgaagccttaacattcaactcacgtttggatctctcagacgagagtttttcaaaacaggtgcatttccttgggtagatcataaccactttttaaaaagtgaaaaaagttcgtatgaaatattagtatcatagaaaatggtaagacgcttttcaaaatttaaacgtcgatatgctgaattaacaatataaaattcaatataaaatttctttgtggctaaccactggtccaaaccaacttagtttctttcttttctatttattttcaggttctgtttttttttttttttttttgagacagagtctcactctgtcgcccaggctggagagcagtagtggcacaatcatagctcactgcagcctcgacctcctgagctaaagcaatcctcccgcctcagtttcctgagtagctgggactacaggcgtgcaccttaaaaataaacaaaaacaaaaaacaaaaaaaccagacaattttaatttggaaataattttaaacttatagataacctacacaaatataaacactggagtacaaacaaatcctctactctgatttgtttgttaacagtttacctcattgctttggcttcatcattccatctatccatccatccacccacccacccacccatcctagcccaatcatcagggacaagcaagacaaagtcaggtttgttgacccactgaaatgagagcgatcagcccccagaggagaagctgcaatcaagttataggatttggaagaagagagaaatttggatgaaatttaagtgaaacaatgtttagctaggtttagaacaaggtaggaatgtgtataagggagtcagcatcaggcctgggccgcatacagtagctcatgtctgtatcccagtgctttgggaggccaagacaagaggatcgcttgaacccaggagttcaagacccgcttgggtgacatctctatggaaggaagggagggaggggagggaggggagaaaaggggaggggagtgagggggggagggaaggggaggagaaaattatctgggtgtggtggcacacgcctgtagtcccagccacttgggaggctgaggtgggaggattgcttgggcccaggagtttgaggttgcagtgagctatgattgtatcactgtattccagtctgggtgacagaacgagatcctgtctcaaaaaaaaaaaaaaaaaaaaggaaatatcagatttggactgcaaagtggacctaaggtcttgtttccctggaaactacaatgttaatataaatgtggcatgctgtgcccagaaactttttatttaaaactctgcaccagggctggaaatggaggcttcttatctttgtcaaagtgacagatcttccaggaaagaaagatgagtctgtttcattcttacggatagactttcataccgcagagtttcccacagtctatgattttagagaacaaagtttctcagtgagtaagatagcagtagtcgctcataaagggggctgttagaacacttttactgctgcagctcgcccctgggtgaaatgtgtcctgttaaccttgcggttggctttatctcagtctatagatgaagggcaggccagatttttatagtattagctggctttagctcatatatatatatatataatttttcttttcttttgctgcctttctttttctttctttctctctcccatctttctttcctttttcttttgtctttttttttttttttttttttgagatggagttttgctctgtcattcaggctgaagaaccatggtgcaatctcggctcactgcaatctccacttcctcagttcaaacaattctcctgccgcagcctcctgagtagctgggactacaggtgcctgccaccacacctggctaatttttgtatttttagtagagacaaggtttcgccatgttggccaggctggtcttgaactcctgacctcaggtgatccacccgcctcggccccccaaagtgctgggattacagttgtgagccaccgcgcccagccagttgtcatgtctctttagcctccttgaatctggaacatttccatatttataatattgacattttggtggccgggcgtggtggctcacgcctgtaattgcagcaggttgggaggccgaggcgggtggatcacgaggtcaggagatcgagaccgtcctggctaacatggtgaaaccccatctttactaaaaatacaaaaaattagccgggtgtggttgcaggcgcctgtagtcccagctactcgggagcctgagacaggaaaatggcgtgaacccaggaggcagagcttgcagtgagccgagatcacgccactgcactccagcctgggcaacagagcaagactccgtctaaaaaaaaattttatatatatatatgcacacacattttggaagaacagctccttgcccttttaaaaatagaagttccacatttttagtcggtctgatgtttccccatgatgattagattcaagttatacattctccaccagaataatgaggtgaggtgtgtacttctttgaaggtatcccatctggacatagtcagtgtcctactgtgcctcattagtgaagtgagttttcatcacccagcgagctgatgtcccattccccagctctataatactcctttgcagctaataagcagtccaggggcagatactttaagacaggcagtatctgcctttcatcaaaatttcccccttgatttcgcacccattgatgattcagctgatgtgggcttattatgaataacaaaagatgctcctggcctggtagggtggctcacgcctgtaatcccagtactttgggaagctgaggcgggaagatcacttgaattcaggagtttgagaccagcctgggcaacatagtgggatcttgtctctaaagaaaatataaaaattagcctggcatggtggcaagagcctgaagtcccagctacttgggaggatgaggtgggaggattgcttgagcccaggaggtcgaggctgcagtgagctgtgatcatgccactgcactccaacctggacaacagagggagaccctgtctgaaaaaaaaaaagacaagaaaaagaataggacgttactgttaaacgccttctcccatccccctcgccagtacctaccatcctgacttgtgtttcgccgttgcttgattttcattattattttagcatgtgtgtatgtttcccaaaaaacatcttatttagttttgcttgttttttgggctttggagtaataatacacgtattcgttgtctcgaactgcccttataaagtaccacaggctaggggactgaaacagcagaattgatcatctcccagttctggaggctggaagtctggagatcaagatgttggcacggttggtttcttctgaggcctccttctttggcttgcagacggccgccttcttgctgtgccctcatgtggtcctctctgtgtgcacatccctggtgactctctgtatggccatatatcctcttcccataaggatgaagtccaattggattagggcccaccctaatggccccatttaaccttcaccacctctttagagatcctatctccaaatacagtcatgttctgatgtactgggggttagggctccaaaatatgaattttgggggctgcatttcagctcacaaccatatcttactgtatgcaacttgctatttttttttttttttttgaaacagagtctcgctctgttgccctggctggagtgaagtggtacgatctcagctcactgaaacctccgcctcctgggttcaagccattcgccttgcttcagcttcccaagtagttgggactacaggcacacaccaccacacctggctaatttttgtatttgtacagatgaggtttcaccacgttgaccaggctggtctcgaacttctgacctcaagtgatccacccgcctcggccttccaatgtgttgggattacaagtgtgatccattgcaccctatcaatgcaacttgctttttaaagacaaactcctatcactaagatgcgttcgtgatggtgcctgtagcttttgtttgcacatttttcaggggtatggtatgaaaatgcttaaaaataatgtggggagaaatcgatgaaatggatgggggaagaaaagaagattaacaaaactaaaagctattctaatttttgaaaaagcaactaagacagacttacttttggcaaaccgattaagaacaaagagacaggctgcaaataaaatacaaattgtaaagtggtgaataattacagccaggacagagatataaaaagtaattatattatggctatgtgctaacattaaaaacctgaatgaactggttaaattactagcaaaatatacaatgcgaaaatgacacaaaattacagactgaataagccagtgactattgaagaatttgaaattatattcagagatctcccctctccccaaaaaacccccaggcacagatggttttctaagcaagtgataccaaacattcaaagaatgtttaattcctatcttgtatgaattattccagaaaatcgctggaaaattatgtaataactgcctgattcatttttagagactaatgcaatgttgaatccaaaatcggataaggaccagatgcaagaaaattatagattcatttcgcttgtgaatgaagatgtaaaaatcccaaatcaaataattgccacttcaatccagcatatcataattcttcatgatcaaataagatttctcctcctaatgcgaagatggttcaaaaattaaaaaaaaattctttcaatataattcaccatatcagtagaccaaggaagaaaatataatgatttcaactgatgtgggaaaataatttcataaggctgtacatctatttacgattaaaagttaaaacactccactttgggaggctaaggcaggaggatcgcttgagcccaggagtttgagaccagcttgggcagcacagtgaaaccatgacatggtggtgtgtgctggtggtcccagctacttgggaggcagaggtgggaggatcacttgagcctgggaggctgcgtggttttgaattgcatttctgtgatgattaatggtgttaatattttcctggacatttagcccatttatatatcttctctgggaaatgtctgttcagatcatttgccccttttttgtttggtcgttttattttattttttgagacggagtctcactctgttgcccaggctggagtgcagtggtggaatcccggctcagtgcagcctccacctcccgggttccagcgattctcctgcctcagcctctcaagtagctgagattacaggcacccaccatcgtgcccagatagtttttgtattttttagtagatatggggtttcgctatgttggccaggctgctctcaaactgctgaccttaagtgatcttcccgccttggcctcctaaagtgttgggactacagctgtgagccaccacgcctggcctcacccattttaaaattgggttacttgagttctttgcacattttattttttgtttttgctttttggagggttactgtatacatcttaatttatcagaatcagtttcagatttatactagctttattacagtgagatatagaatggttattcctagatagttctattccatttccccttgttgtggtatcattataaacttttttttttttttttgagacggagtcttgctctgttgcccaggctggagtgtggtggtgcagtctcagcttactgcaacctctgcctcctgggttcaagctattctcctgcctcagcctcctgagtagctgggattacaggcacctgccaccacgcccaggtaatttttgtatttttagtacagatggggtttcgccatgttggccaggctggtctccaactcctgacctcaggtgatctgcctgccttggcctcccaaagtgctgggattacaggcatgagccactgcaccagacagtaatgcattaagctttgaatacctaagctcaagagttgacatcaacctttccccacagataattctggtgcttgtgaactagtggtctccgtagatgtttgccaccaagaaggtcctggggactcgcaaaaacagtctgtgggagatggatatgtgagtctgcttctaagaggctctttggccgcctctggcacacggggccatctctctcctgcttgccctctgccctcttctctccctccattttccataatttcaacaaaatcagttaatatttacaaagcactgagaacagcacttgggactcagtaggtgctaaaaaaaatcatcagctgcttcttttttttttttttttttttttagacagaatcttaccctgttgcccaggctggagtgcagcagtatgatctcagctcactgcaacctctgcctcctgggttccagcaattttcctgccttggcctcccaagtagctgggattacagatgcctgccaccacacgagctaagttttgtatttgtagtagaaacagcatttcaccatgttggccaggctggtctcgatctcctgacctcaggtaatccacatgcctcggcctcccaaagtgctggaattacaggcatgagccaccatgtctggcccatcagttgctattattagcattattccttctggggaatgttttagatactgcatttcatggactctaagaaactccacttttatggttgttacaaagaaagaaaagtgtatactgtctataagatgcaacaatgcttccttaccacttggaatttttatttcttatttactgaaagagcttttatgggtgtatttattgcgaacaataaaggaaaatacaagtaaaataaaggattcctaaaattgttccacaattgagatcctttttttttgtttattatggaaaagttatacaaaaattagctggacatggtggtgtgtacctgtggtcccagctactcgggaggctgaggtgagagaatcacttgagcccgggaggtcgaagctgcagtgagtcgtgatggcgccattgcacgccagcctggatgacagagtggcgggagggagaccctgtctcgaaaaaaaaagaaaaaaaaaggttgcgtgtaagaactaaaaatcattactgctgggctcttgatccagctttgcaattagaggagacagtttattgctgacttctgttttcagagcaaacaccaaacacaacttattccccaccaattccccctgacccacccaggcccaccaagttggttcccgggggctgagagtgccccactcttgtctgctggattttcttctgggctgtggacaccccttctgcaggttttcatgcctttcaaacagcagtcgtatggtgccagacgttgaaagatgccttccggtttcagaggcgtcaagatatgggaaaagtggcttcttagaattgatcagttacgatgtgtttttcaaaggtggcgtctcctttactgcaggcagttccttctctaagggagagcttgtgggatgatggttgttctccccaggctctactctgcctggatttgggcactgcttattgccaagctgatatcctaactaatattttcaagtgggcagcctggtttcggatacttaatttctagcagcatttcccctgctgccacgccatcttcagtcttttaaaattgtagtaccctgggaagagtttatggcattcttacccaattccttcttggcgcaaatttaaggtttttttgtttgtttgtttttttccttccctaagtgttttgctattgcaatgtcaaactaaataagaaacacagagaggcttccaaaagaaaatatgttatctgggaatagatcactgcagtgggaaatgcatgtcatagtaaactatgtgcgtatgcagggaggtaaaggaagaagaaggtttttaaagggaaagaagaggaggattacatattgtttcgaaataattatccttggctgcaaagatcgataataaaggtgacaccagtctgagggtgaacaggcaattgtgggggagatgtccttgagtatttttggtggcaggttgtgatggcttttgtgccaggttgtggtttttatagagtcttgtaataggtgttgttggtttttgtttttgtttttgttttattttgtttttgagatggggtctcactctgtcacccagactggagtgcagtggtgtgatctcagctcaatgcagtgcagcctccaactcctgggctcaagcgatcctcccacctcagcctccggagtagctgggactacaggcacataccactatgcccagctaatatttggtattttttgttgagatggagattcgccatgttgcccaggctggtctccaactcctgggttcaaattgagcctccctcctcggcttcccaaagtgctgggattacaggcatgagccctcataccacgcatgtgatagtttttgttatcaagcatacaagcatgataaccctctcttcgtggctctagttgtcaatgtttaaaaatattagtacctagggatgggtgcggtggctcacacctgtaatcccagcactttgggaggccgaggcgggcggatcacgaggttaggagattgagaccatcctggataacacggtgaaactccgtctctactaaaaatacaaaaaactagccaggtatagtggcgggcgcctgtagccccagctactcgggaggctgaggcaggagaatgtcgtgaacccaggaggcggaacttgcagtgagccgagattgcgccactgcacttcagcctgggcgacagagcgagactccatctcaaaaaagaaaataaataaataaatactagtaccgagggatgggcgcggtggctcacgcctgtaatcccagcactttgggaggccgaggcaggcggatcacgaggtcagaagtttgagaccagcctggacaacatggcaaaaccccgtctgtctgtactgaaaacacaaaaattagctgaacgtggtgttgctcccaagtaattccagctacttgggaggctgaggcaggagaatcgcttgaacccgggaggtggaggttgcagtgagctgagatcacgccactgcactccagcctgtgccacaagagtgagactccgtctcaaaataaattaaatacataaataaaataaagacaaaaatgttagtacctctattttgattttggtgatttttacaataaatagtgctgcaaatgacacctttggggatgaagcttttgtccgtgtttaggattttttctttggtctcgattcccacaagtggaccccaagaaagaaaagatcttgtttctgtcactcagaaggtcctgacaaccctacaaccgagcaggagagaggctgccctggcctgccgcaccgccccgggaattcctgtgagattgttccctggttgttgatggacggggttggattttgatttcttgtgtgcgggagcgtcttcctgccatgatggttggccactccctctctttccgatttgcagatgtgtctccttgtcttttgcccacttgcctactggaatccaactttgttgcttttctgtgtggtttacatgataagattattgacgctatttctgtcacaggggatataagtttttttccaagtctatttcttgacttataattttagtgtgagttttgttttatacacagagattttaatttaaaggctgtcaaatctgtctccttaatatgagaaaaaaggaaaaaaattagcattttttaaataaaggcataatttgcatacagcacaattcaccctttttaggtgcagttctgaggttttggcaaatgcacgcatcacgtgaccaccccgcaaccaaaacacagaacagttccatcaccgcaaattccctcacaccccgttacggctcaagtgttcaaaacataagaaagctaaaagaatagacgtgaataggcaattcttttctccgggttgctctatgttttaaaagattgacccccaatttttttgtctttttttcttgaataaaaccgaaaatgccaaatttcagggggaggaattgcagctcaaactaaaattggtagttaaagagtcccctgccatccttgttcttccctcagataatgagaattgttaacaagttccttcctttccctccttccttccctccttccttccttccttccttccttccttccttccttccttccttccttctttccttccttccttccttcctccctttcctccttcctttctttaaatagagatgggttctcaccatgttgcccaggctggtctcaaacccatcctgggctcaagtgatcctcctgccttggcctcccaaagtgctgggattacaggcatgagccaccgtgcccacctaagtctttcttttgagggctttctctctgccttttatttctcttcacgtattcattcacgcaccaggcacaggtggagccccgccatgcacgcccgcatctgtgcgtgttccacagtgtgcaccattcctgggctccctcatgcatttcacctaacagcatcattgtcacgttctcctccaccatagcacagagcgtctaagggtgccaccctctcccataactagagacacatgagtgacagcagcaatgagctgtcccatctgctagtcgtcgacacagaagagccagactgagagagctgggtgccaatcacaccacgcagggacaggctgtctgcccagaggaggccggtggtgtccacacctgcctcgctggggccgtttcaacacaaatcttccagcagttcttaactgaacgtctgacctaccgactccactttcgggagtttatcctttggtgatattttctcaaagggccaataatcacagtggctcacagaaaagagttctccgtgtttgccggatatcctgctgagaatttgacactttgatctcatttaaaccctgcaacaaccttgaggtgggtgctgttgttacttccatattagagcggaagaaaaggaactcagagagatgactttacttatccaagaccacccagccaggcggcagggctgggaacccaagcatgaagtgaaatagccccgccctggactggctggatggtagccacagtctacatgtgagtaagacactgaatttaagaaaagaaatcactttattaagatataatttacataccatgcaattcacccacgtaaagagtaaaattcaacggttgttggtatattgcgttattcatttttaacattatgttaatgtgtggcataaaatttccattgaaccgtttttaaatgtataattcagcggcattaattacattcataacgttgtgtaaccatcaccacaatctatttaaaaactttttcatcccccccaaacggtaactctgtaaccgttaagcagtaaatcccctttctctctcccccattgcctgatgaagtaggaggtgggactagactctggaggtgggacttgcactcaggatcaaattgaagaccagctgaaacagggaagaggggaaagcgcttctccataagacacgcccaccagtgccatgtcagtttcccgttgccatgacaacaccccgacgttaacacccctctccatggcagtgacttgatgacctggaggttaccaccctttttctagtcactagtggataatctgtaccttaatttgcatataattaaaagtgggtataagtatggctgctgggcacactgcctatggggtagcctttcaggcaaggagcagtacccgtgtcgctgctgtacactgcggcttcgataaaagttgctgttggttaggcatggtggctcacgcctataatcccaactaggaggctgaggcaggaggatcacttgacatcaggagttcgagaccagcctggccaacatggtgaaactctgtctctactaaaaatacaaaaattagccaggcatggtggtgggcacctgtaatcccagctactcaggaggctgaggcagaattgtttgaacctgggaggcagaggttgcagtgagccaagattgcagcactgcattccagcctgtgcagcagagcaagactctgcctcaaaaaaaaaaaaaaaaaaaaaacaaaacagttgctgtctatactttctgatgacaggtaaaaagaagttgctgtctaacacctccagctcacccttgaattatttcctggccaaagccacgagccctcccaggccaagtcccaatttggggtctcacctgtctagcatccctgggacaacagtaggagccgcttgagcttgtggcttctcctcagcaaatatgggaaacagagaaagatctggaatcagacagaggttggtgtcatttctgcctgttgtaacctgtcatctagggcaggtccctctcttcctggggctctcagtcaggttctgtacaaggttctcaccctccccacggaaggaggctgccaggaggagccagcaaagctattcaacttgcaggggctccagaatagcctctcctgtggcctctgtccactccctacccctgcaccttcagcaattcccacccagtggcgaccgtaagatgcccagacacagagcattatttctgctctttcactgcatacccaatgttagtccaaactgcaccattttggaagccttctgccattttgcaggtcaaagtgaaatattccacgggggttcaggcggggagaaacatccttatcataccctgccgtgcaaaggcccgactgaaggaaaaatccctgtcatatcctgctgggcaaaggtccaaggaatatcttatcacatcccactggaaaaagggccaaaccgcctgatcgcacatcttatcaatatcctgccaggcagcaagccacactgctcagacccctcccacccatacctttaagtaccccagcctataagcggccgtgggctctggccctaagctggtcccccatctccgcaggtttttgcaatatacctatgttgctgttgagcccctgtctctctctctctttccctctctctgtttgtgtttgtttgtttgtttttttgagacggagttttgctctttcacccaggctggagtgcaatggcacgatctcggctcactgcaacctctgcgtcccgggttcaagcaattcccctgcctcagcctcccgagtagctgggattacaggtgcccaccaccacgcatggctgatttttgtatttttagtagagttggggtttcaccatgttgtccaggctggtgtcaaactcctgacctcaggtgatccacccatctaggcctcccaaagtgctgggattacacgtatgagccaccgtgcccggcctgtggtgtcattctttaaccctcgccttcccttcaaaacctaacaccctaaggactggaatgcctgcgccacatactcagccatgtgggtgggtctgagctctggcctgggctccctgtggggaggctggttgggagaggagacatgatgggattccagccctgggactcactgccttgtcactggagcgggtttcctcagctctctaggtctcactttattcattctgcagtgaacattccctgagtccctgctgtgaggctcacacagctgtatccaaccaggagctccatcctaaagggatcccaagaggttcttcccccaatttcccagttctccaacatcaaccaggtgcccaaccattcaattcagttccaacattgactgcccagagttagtgtcagatgctgcaggttatggacttgggccacaaaactgcccccacctcaggccaggcgtggtggctcacacctctaatcccagcactttgggaggccgaggcaggtggatcatgaggtcaggagttcaagaccagcctggccaatacggtgaaacccccgtctctgctaaaaatacaaaaattagctgggagtggtggcacatgcctgtagtcccagctacttggaaggctgaggcagaagaattgcttgaacctgggaagcggaggttgcagtgagccgagattgcaccactgcactccagcctgggcaacagagtgagactccatctcaaaacaaaacaaaacaaaataacaagcaaaaaaaaactgcccccacctcagatgccagctacagtagggtgtccacactaccttaatttctgcccagccaatcaccagttcaggggttcccaaaactctcactgatatggtttggatgtttgtctcctcgacaaatctcacgttgaaatgcgacctccggcgggcgcggtggctcacgcctgtaatcccagcactttgagaggccaaggcgggtggatcacgaggtcagcagatcgagaccacccgggccaacacggtgaaactccgtctctactaaaaatacaaaaaattagccgggcgtggtggcgggcgcctgtagtgccagctactcgggaggttgaggcaggagaatggcgggaacccgggaggcggagcttgcagtgagccgagatggcgccaccgcactccagcctgggccgcgccaccgcactccagcctgggtgacagcgagactccgtctcaaaaaaaaaaaaaaaaaaaaaaaaaaaaagaaatgcgacctccaatgttggaggtggggcctgatgggaggggtttgggtcatggggcggatccctcatgaatggcttggtgctgtccttgcagtaatgagagttcccagtctgtgagctcgtatgagatctgactgtttaaaagagtctgggtcggcgcagtggctcacgcctgttaatcccagcactttgggaggccgaggcaggtagatcacctgagatcaggagctcgagaccagcctggccaagatggtgaaaccccatctctactaaaatgcaaaaattagtcagatgtggtggcccatgcctgtaatcccagttactcgggaggctgaggcagaagaattgcttgtccccgggaggtggaggttgcagtgagctgagatcgcaccaatgatctgcactccagctggggcgacagagtgagaatctgtctcctgccccacatcaaccaaaaaaaaaaaaaaaaagagagagtctgatacctcttccttctctctcttgttctatctctcattgtgtcatgtgctggctccccctttggcttccaccatgattggaagccccctgaagccctcactggaagcagaacagatacaggtgccatgcttgtacagcctgcagaacagtgagccgaatacatctcttttctttatgaatgacgcagcctcagacattcctttatagtaatgcaaatggaataaaacacctactcaaatacactaattcgctacaggttgggcacagtggctcacgcttgtaatctcagcactttgagaggtcaaggagggaggattgcttgagcccaagagttggagaccagcttgggcaacatagcatgaccccatctctaccaaaaataaaataaattagccaagtgtggggacatgcacctgtagtcccagctactcaggaggctgaggcaggaggctcatttgagtccaagagattgagagcacagtgagctatatgatcaggcaactatgctccagcctgggtgacagagcgagaacttgtctcagaaaaaaaaaaaaaagaaaaagaaagaaaagaaaaagaaaaaagaaaaaacaatcactagaacaactcacagaattcaggcaagcattttacttattattactggtttattataaaggatagaactcaggaatgaaagagatacatagagtgagttatggggaagagcatggagctgccaggtcctctccaggcaccaccctcccagcacctcaatgtgctcaccaggcttcatggtccaggggctgtgtgtatatatgtgtgtgtgtgtgtgtgtgtgtgtgtgtgtgtgtgtgtgtgcgcgtgtgtttgagatggagcctccctctgtcacccaggctggagagcagtggcgtgatcttggctctctgcaacctccacctctcgggttcaagtgattctcctgcctcagccttccaagtagctgggattacaggtacgtgccaccatgcctggctaatttttatgcattttgggtagagacggggttttgccatgctggccaggctggtctcgaactcctgacctcaggtgatctgcccaccttggcctcccaaagtgctgggattacaggtgtgagccactgtgcccagcctctttgtattgctcttgtaacttttctgtaactgtgaagtgatctccaggttaaaaaaaaaatgtaccccgcataatctcacttatatgtggaatctaaaagagtggaactcggctaggcgcagtagctcctgcctgtaatcccagcatgttgggaggccgaggcaggaggattactggaggccaggagtttgagaccagcctgggcaacatagcaagatctcatctctaaaaaaagaaagaaagaaacgaaaagaaaaatatgaacttgttaacaattctcattatctgagggaagaacgaggatggcaggggactctttaactaccaattttagtttgagctgcaatttccccctcatttagcattttcggttttattcaagaaaaaaaaaagacaaaaattagggttcaatatcataaaacatagagcaacccggagaaaagaattgcctattcacatctattcttttagctttcttacgttttaaccacttgagccgtaacggggtgtgaggggatttgcggtgatggaactgttctgtgttttggttacggggtggtcacgtgatgcgtgcatttgccaaaacctcagaactgcacctaaaaagggtgaattgtgctgtatgcaaattatgcctttatttaaaaatgctaactaattttttctcttttttctcatattaaggagaccgatttgacagcctttaaatcaaaatctctgtgtataaaactctcactaaaattatgtcaagaaatagacttggaaaaaaacttatattccctgcgacagaaatagcgtcaataatcttatcatgtaaaccacataaaaaaggaacaaagttggattccagtaggcaagtgggcaaaagacacggagagacgtttgcaaatcgtaaagagagggagtggccaaccatcatggcaggaagacgttcctgcacacaagaaatcaaaatccaaccccgtccatcaacaagcaggaaacaatctcacaggaatccccggggcggtgtggcaggccggcgcagcctctctcctgctcggttgtagggttgtcaggaccttctgggtgacagagacaagatcttttctttcttggggtccacttgtgggaatcgagaccaaagaaaaaatcctaggccaggcgcggtggctcacgcctgtaatcccagcactttgggaggccgaggcgggcagatcacgaggtcgggagatcgagaccatcctggctaacatggtgaaaccccgtctctactaaaaatacaaaacattagccgggtgtggcggtgggcgcctgtagtcccagctactcgggaggctgaggcaggagaatggtgtgaacccgggtggcggagcttgcagtgagccgagatcacgccactgcactccagcctgggcgacagagcgatactccgtctaaaaaaaaaaaaagaaagaaagaaagaaagaatcctaaacacggacaaaattttcatccccaaaggtgttatttacagcactatttttaatgcaaaacagttagggaggaaaaaacaacacttaaatttgccaagaactgattgggtaataatgccataaaccaccgtgaggtactatgatttaaaaaaaggttcagagccggcagagcagcggtggtgagtggctggtaggagatgaacataaagctgggggccgggcacggtggctcaggcctgtaatcccagcactttgcgaggctgaggtgggtggatcacctgaggtcaggagttcgagaccagcctggccaacatggcaaaaccccatctctaccataaatacaaaattatttgggtgtggttgtgcatgcctgtaatcccagctactttcgaggctgaagcaggagactcgcttgaacttgggaggcggaggttgcagtgagccgagatcgtgccattgcactccagcctggacgacaaaagagaaactccgtctcaaaaaaaaaaggatgaaatcttgtgctttgtggtaacatgcatgcggctggagaccattatcctcatggaattcacgcaggaacagaaaaccaaataccacatgttctcacttataagtgagagcttaacattgggtactcatgatgtaaagatggaaaaatgggcactggcgactgctagagaccggaaagggggaggcggcgagggttgaataaccaactgtaggggactacgctcagtacctgggtggtggggtcattcgtaacccaaacctcagtatcacgtaatatacccaggtcggccaggcgtggtggctgacgtctgtaatccaagcactttgggaggccgaggtgggcggatcacctgaggtaagaagtttgagaccagcctggactacgtggtgaaaccccgtctctactaaaaatacaaatatcagccgggcgaggtgttgtatgcctgtggtcccagctactcggcaggctgaggcaggataattacttgaaccccggaggcggaggttgcagtgagccgagattgcaccattgcattccagcctgggtgacggagcaagactctgtccactgcccccgccccacaaacatacatatataaatatataactattatatataaatatataatatatatctattaaatatataacatataatatttatatctataaatatatatgaatattatatataaatatataatatttatatctataaatatatatgaatattatatataatatataatatatatctattaaatatatataaatattatatataaatatataatatatatctattaaatatatataaatattatatataaatatataatatatctattaaatatatataaatgttatatataaatatataatatatatctatgaaatatataaatattatatataaatatataatatatatctattaaatatatataatatataatatttatatctataaatatataactattatatataaatatataatatatatctattatatataacattatatataatatttatgtctataaatatatataaacattatatatatattatatatctattaaatatatataactattatatataatattctatatctataaatatatataactattttatatatctctctctctctttctctctctccaggtccatgtaccccctgaatctaaaataaaaggagaaaaaaataccagaatggccaccaaaacaaagcaaaaaaggctgaatgttgtgtgcagcaggagaaatacatttagaatttcaccatgggaggaggtaatccccaaatccaggcagagcacagcctggggagaacaaccgtcatctcaccagctctccccggtgttgcccttagaaaaggaactggtttcattttttaaattattatttgtttttgagatggagtctcactgtgtcacccaggctggagtgcagtggcgcaatctcggctcactgcaacctccgcctcctgggttcaagtgattctcctgcctcagcctgtcgggtagctgggacgacaggtacccgccaccacacctggctaattttttgtatttttagtagagatggggttcaccatgttggccagggtagtctctaactcctgacctcaagtgatccgctggcctcagcctcccaaagtgctgagtcactgcgcccggccttcacatgcactctttaaagcaacaccaggttgacgtctacttgggtttcacaaactatgacccaccgcccaggccaaatctgacgcactgcctgttttggggcagtcggtgagctcatggttaagcaaaatcaaaagaaggataataatgttcacgacacacgaaaatgatgtgaagttcaaaattcagtgtccataaataaagttttattggcacaaagccctgcccactcctttacctgtttttcgtgaatcttccgtcatcccacaacagcagagccctcctacctcagcctcccaagtagctgggattacgggcatccgccaccacacctggctaattttttttttgtatttttagtagagacggggtttcaccatgttgtccaggctggttttgaactcctgacctcaaatgatctgcctgccttggcctcccaaggtgctaaaattacaggaatgagccaccatgcctggtaactgtatttctcttaaaggggtcctttcttttggaaattgatgctgaaatatttatttatttatttatttatttattgagacagagttacactctgttgcccaggttggagtgcagtggtgtaatctcaactcactgcaaacctctgcctcccgggttcaagcgattctcctgcctcagcctcctgagtagctggggctacaggtgtgtaccaccatgcccggctaatttttgtatttttagtaaagatggggtttcaccatgttggcaaggctggtcttgaactcctgacctcaagtgatccgcctgcctcggcctcaggtggatcacctgaggtcaggagtttgagacaagcctggccaatatggtgaaacctcgtctctactaaaaatacaaaaattagctgggcgagatgacacccacctgtaatcccaggtactcgggaggctgaggcaggagaatcgcttaaatctgggaggtggaggttgcagtgagccaagatcgcaccattgtgctccagcctgggcgagagagcgagactccaactcaaaaaataaaataaaataaaataagcattggattgcattttttaggctgtgtctttgtgataccttaccctgttttaaccggagtgactgtctcctagcagagagagctggacagactccattttggtttcttcacttggggccccccgtatcccccttaagggaataactagtgcaagctgacaccaagcacatccaggaatgcacctgctgataagatattgaggcagcctgtattagcagctcctgctcggtggaaggtacctaaaagcccctgcatttatctcttagtgatagtttaagcccctgcacctggaactgtttattttttgtaactgcttccataaccaattaattttttaactttttgcctgttctgcttctgtaaaactacttcagttaaactccccctcctctatttagaccatagtataaaagagaatctagccccttcttcgagatggagagaattctaagcgctagctgtctctcagtcgctggctaataaaggactccataatttgtctcaaagtgtggcatttctctctaactcgcttggttacaacatcttgtctttctggtgacacctgttgacatgatgtgccttagagtcagtgaaatgttactgctgaggccgcagcattctcccgagggaataaagccatgtgcagcataacgaggtttctgtcaatgacagactgcacgtccgacggtggccccaccgattataatggagctaagactgcaattgcccggtgatgttgtcgctgtcctaatggagtagctcaaggcgttactctaatgtttgtgccgatgctggtgtacacagacctacttgactgccagtcatagaaaagcatagcacatataattgtgtacagtacatcatacctgtcaatggcaacgggcaggacatggtggctcgcacctgtaatcccagcactttgggaggctgaagtagggcaatcgctcgaggccagaagttcgagaccagcccatgcaacatagtgagaccctgtctctacaaaaaagaaaaaaaagtcaataaacaactatgttactggtgtatatatttactatatataggtttctttgtttgttttttgagatggagtctcgttctgtcacccaggctggctcactgcaacctctgcctccccagttcaagtgattctcctgcctcagcctcctgagtagctgggattataggcatgcaccaccatgcccgaatactttttgtatttttagtagagatggggtttcactatgttggccaggctggtctcgaactcctgacctcaagtgatccacccactttggcctcccaaagtgctgggaaacaggtatgagccaccacggccggcctttattcaccgtactatagtttttattgttattttagagtgtactccttttacttataaagaaaagttaactgcttgagtctaagagttcgagaccagcctgggcaatatagtgagacttagtctctgcaaaaaagaaaaaaatgtaaaaattagcccagtgtggtggtgtgtgccttagttcccgctactcaggaggctgaggtgggaggatcgtttgagcctgagaggcataagctgcagtgagctgagactgtgccactgcattcccgcctgggtaacagagtgggaccttgcctcaaaaaaaaaaaaaaggaaagggaaaaattaactgtcaaaacagcctcaggcagctccttcagaaggtgtccagaaaaaagcactgttatcctaggagacgacagctccaagggtgttattgcccctgaagatcttccagtgggataagacgtggagatggaagacagtgacgttgatgatcctgaccctgcataggcctaggctgatgtgtgtgtgtttgtgtcttacattttttctttttctgagatggagtcttgctctgtcacccaggcaggagtgtaatggtgtgatctcggctcactgcaatctctgcctcctgggttgaagtgattcttttgccttagccttcccagtagctggaattacagcactttgggaggccgaggtggacggatcactggaggtcaggcgttttgagaccagcctggccaacatggtgaaaacccatctctactaaaaatacaaaaattatccaggtgtggtggtgcatgcctgtaatcccagctacttgggaggctgtggcagaagaatcgcttgaacctgggaggcggaggttgcagtgagttgagattgtgccattgcaaatcagtgtgggtgacagagtgggactccgtctcaaaaaataaatagatggtcgcatttgggctatggcctagacccctgtgctagatcatctggcacaggtgtgtagcagactctcccacctaggtttgtgtaagcacactctatgatatctatacaatgatgaaatcacctaaggatacatctctcagaatttattcctgatgttaatcgaagcaggactatagcagtattaataacgagacctaacaatgcttgagcacctactatgtgccaagaagttttttttgttttgttctgtttttgtttttgatgaatctcactctgttgcccaggctggagtgcagtagctcaatctcgaccggctgcaacctccacctctgaggttcaagcaattcgcctgcctcagcctccgaagtagctgggattacaggcacccaccctgatgtctggctaatttttgtatttttagtagagacagggtttcgccatgttggccaggctggtcttgaactccttgtctcaggtaatccacccgccttggcctcccaaagtgctgggatcacaggcgtgagccaccgagcccggccgcaagaagttttaagtgttttgtatctcttaacaaatttcattagcacaaagagggcagaggagaattggaatggccttgcggaaagacctccctggcacccgcctcctccttatgccccaagcctgcagcccctggggcctattattagggcccacatctggtgacatttcccggactgatagcgatctctgaagctcttgctcaaggttctttcctggacgtttatctgctccaaaactcacagctagcttcctgccatcagccccctacctttaacgtgggctcaaggctggcggccacctgggactgacgacagagacagaaagagccccctcaccttgcctcaccctcagacacagcacaaggtgacgggaccgggattcgttgcggggtgtgtctcagggagccaggaggtaggagcttggggattaggagagttgaagggcactctccagggtatacaaaaaggaggtagtgggctgggcacagtggctcacccctgtaatcctagcacttagggaggccgaggcaggtggatcacctgaggtcaagagttggagaccaccctggccaacatagtgaatccccatctctactaaaaatacaaaaaccagccgggtgtggtggcagctgcctgtaatcccagctacttaggaggctgaggcaggagaattgcttgaacccaggagacagaggttgcagtgagctgagatcgtgccattgcactccggcctaggcaatagagtgagactccatctcaaaagaaaaaaaaaaaaagaggtggcaaaaaggggctgaaagttctgggccacctcctctgggtgaggaatgttctcatgccatatgcgtgaactgtgcctggtcagaggtatttgactgtcttcatcactgcggtacccccagcgcttaggatagtgtctggtgtacaatttgggctcaatgcataattttacactaaatgaatgaatccatcctcagatgacaaaggagagattgccctccttaatggatcactcatcgattatttaccaagtgcctgctgtgttccaggggccaggagcaagccacacaccagcctcgcctctagggaactcagagatgaataatgcagatgggtgatcaccaaatgatccaacaaacgcggtctaattgctgctgcctgtaaccagctctttttttgtgggggctcggggggaacggggggacaacagagtcttgctctatcacccaggctggagtgcagtggcatgatcacagttctctccaaactccgcctcccgggttcaagcgattctcctgcctcagcctcccaagtagctgagattacaggcatgcaccaccacacccagctaatttttgtatctttagtagagatgggggtctcaccatgttggccaggctggtctcaaactcctgacctcatgcgatcctcccaccttagcttcccaaagtactggtattacaggtgtgagccaccgttcccagcctgtaatcatctcttcatgggagagaagctcctataggagggtctgattgaaaagggcaggaaaaactttggggagaaagtgaaatttgcactgagatcgcaggaatgagttaaaaaaaaaaaaaagcagaggaaagaaaaggtgttccaggcagaggggcagcacatgcaaaggccctggggtgggagggagatgagaatcttggcaatggacacaaaggtagggaagccgggatttggtgcacaaagagggggaaggtgcaagagaagtctggagaggctggcaggtgccccagctctcaccagtggtgccggggagactcatatttatcccacaagcaatgaagagccacagtgtaattttccagtttgaactgtattttttttttttttgagacagggtctcactctgttgcccaggctggagtgcagtggcacagtcatggttcactgcagcctcaatctcctgagctcaagtgatcctcgtgcctcagcctctcgggtagctggaattacaatgcaagccacactgtttggccaatttatttttattttgtagagacagggtttcgccttgccacctagactggtcctgaagccctggcctcaagtgattctcctgcctgggtctcccacagcgctggggttacaaggtttgggctttcaaaggatcactctagctgtagggtggtgagtggctggtaggagatgaatataaagctgagggccaggcacagtggcgcacacctgtactcccagcactttgggaggccgaggtgcatgaatcacctgaggtcaggagttcaagaccagcctggtcaatatggtgaaaccccgtctctactaaaaatataaaaattagctgggcatgtccccagggtgtgtgcctatagtcccaactactctactcaggaggctgaagcaggagaattgcttgaacccgagaggcagaggttgcagtgagccaagattgtaccactgcactccagcttaggcaacacagtgagatcctgtctcaaaaaaaaaaaaaaatgctggggcgctgtgtgcttggatgatagggctgtggagacaggacatagtggacagaggcaagaggctttttggaggcaaaatcgacagggctttgtgatgaattgggtgtgcgtgttgggggagtaggagacagaggtattcaaggattctacacctctatctcagacgagcatactgaggctcagggtggggatggggggcagaaagctctgaacccaggatcacacagtcataatccagcatctcaactagagcttcgacctatgcctgtctgctgtgtaagctcaagctttcctcaaccccagacctctcttctctgcctgcacctcaccctcggaggtcattttcaggttcaaagacataaatagtatctaaattatttttgtatttttttgtagagacaaggaaggtcttgtcatgttgtccaggctgacctggaactcctggacccacacaatcttcccgcctctgtctcccaaagtgctgggactagaaaagtgagccactgtgccctgctggcatctaaattctgactcccacatgcccgtacccagccaggaacccctctgtaatttttttgttttaattttgagacagagcctcactttgtcacccagactggagtgctgtggtgtgatcttgcctcactgtaacccccatctcctgggttcaagcgattcccctgcctcagcctcccgagtagctaggattacaggcacctgcaaccacacccatctaatttttgtatttttagtagagatggggttttgccatgttggccaggctggtctcaaactcctgacctcaggtgatccgcccacctcggccttccaaagtgctgggattacaggcgtgagccactgtgctgggccccctcctgtaatcttgctgccggtatccagctgcctaagtgaactttccccgggatgtcttacaggcatttcaaaggcgaagtgaccaacccggagctcctggtcttaccccaaacctgagctcctggtcttaccccaaacctgctctcctgcagtctcccccatcccagtgcacagcaactccagcttccatcggttcaaaagtcctgcagtcaccccgacactgctctccctctcacctcacacatccagcccagcagcaaatctagccagctccaccttgaccctggaatctgcttcccaccccctcctctgacatcaccctggtccccatccccatcactgcccacctgggttactgcagcagcttcctcccggcctcctgcttccatcccaccccctcagtctagtctcaaccttaaagtcacagtgattgttaagacctaagtcagatattgttccttctctgctcaacagtctcttgtaactcccatctcactcacaggaaaggccaggagagtctgcactatgactcacagggtcctgctccatctgtccgcttccctctctgccttcacgtctcacctctcttcccattgcccacgtggctccagccacaccggcctccctgctgttccttgagcattccaggcaccgtcctgcctcaggacctttgcacaagctgctggttctgcctgaagggctcttcctccagatacgtatgtgcctcactttgtcatttcctccaaaactttgctcaaatgttatattctttttttttttttttgtaatagtctctccctgtctcccatgctgtagtgcaatggcgtgatctcggctcactgcaacctctgcctcccgggttaaagtgattctcctgccctaacctcccgagtagctgggattacatgtgtgtgctaccacgcccagctaatttttttgtgtttttagtagagacggggtttcaccacgttggccaggatggtcttgaacccttaatctcaggtgatcctcccgccttggcatcccaaagtgttgagattacaggcatgagccaccgagcctggccaaatgttatattcttattgaggtcttccctgacaaccccgtttaatgtaccagtgtcccctttctgctttccgtcttgtccctcacattctcaattctccttaacttgattttttttttttttttttggagatggagtctcactctgtcgccgaggctggagtgcagtggcctgatctcggctccctgcaacctccaacctcccaggttcaagtgattctcagcctcccgaatacctgggattacaggtgtgcaccaccatgcctggctaatttttgtatttttagtagagacagggtttcgccctgttgagcaggctggtctcgaactcctgacctcaggtgatctgcctgccttgacctcccaaagtgttggggttacaggcgtgagccactgcacccggccaaaaaatttttaattatttattttttatagagactgggtctcactatgttggccaccttggactggaactcctgacttcatccagtccttctgcttcagcctcacaaagtgctgtgattacaggcatgaccctccacacctggccccctccactttacttattatttttccataacacttggcaatcttctaaagcagtatatcatgaattaatttattatatgtattatacctgacatctcccactgggatgtaagttccacgagggcttgttttgttacatgagttatctctggtacttagagcaatattattgtgtccagtgagccgagatcgtgccattgcactgcagcctgggtgacacagcaagactgtgtctcaaaaaaaaaaaaaaaaagaaagaaagaaagaaaaaagaacagtattattgggtcataaaaagcattcaggctgtgctcaatgtctcacacttgtaatcccagcactctgggaggccaaggtgggaggatcacttgaagccaatagttgaagagtagcctgggcaacacagcaagaccccatctctacagaaaagaaaactaaggctaggcacagtggctcacacctgcaatcctagcattttggaggctgaggtgggtggatcatgaggtcaggagttggagaccagcctggccaaaatcataaaaccccgtctctactaaaaacacaaaaattagccaggcgtggtggcgtgtgcatgtagttccagctacttgggaggctgaggcgggagaattgcttgaacctggtaggtggaggttgcagtgagccgagatcaggccactgcactccagcctgggagacagagcaagactgcatctcaaaaaaaataaataaataaaaaaaattaaaaaaattagccaggcatggtggtaagtgcctgtagtcccagctactccaggaagctgaggtgggaggatctcttgagcctaggaagtggaggctgcagtgatctatgattgtaccattgcactccagcctgggtgacagaatgtgaccctgtctcaaaaagaataataataataatcattccataaaaagtatcaaatggagaaataaatcatcagtggggtctcggaggggaccaggggctgcagtgacaggcaacctggggccctgacacagggtcattcctgttccaggaagatgaatgcttccagatgcctgtctgaggaagtggggtccctccgccctctaaccatggctgtcctgtctgcctcctttgtcgtcggagtgctgggcaatgggctggtgccgtgggtgactgtcttccgcatggcccgcacagtctccaccgtctgcttcttccacctggcccttgccgatttcatgctctcactgtctctgcccatcctcgtgtactatattgtctccaggcagtggctccttggagagtgggcctgcaaactctacaccggttttgtgttcctcaccttctccaccagtaactgcctcctggtcctcatctctgtggaccgttgcatctctgtcctctaccccgtctgggccctgaaccaccgcactgagcagagggcgagctggctggccttcggggtgtggctcctggccgccgccttgtgctctgcgcacctgaaattccggacaaccagaaaatggaatggctgtatgcagtgctacttacagttcaacttggagaatgagactgcccagatgtggactcaggaggtctttgggagacaaatggcggtgatcatggcccacttcctgctgggcttcctggggcccttagcaatcataggcacctgcgcccacctcatccgggccaagctcttgcgggagggctgggtccatgccaaccggcccaagaggctgctgctggtgctggtgagcgctttatctgctggttcccatttaacgtgatgctgttggtccatctgtggcgacgggtgatgctcaaggaattctaccacccccagatgctgctcatcctccaggctagctttgccttgggctgtgtcaacaactgcctcaacccgttcctctacgtcttcgttggcagagatttccaagaaaagtttttccagtctttgacttctgccctggcgagggcgtttggagaggaggagtttctgtcatcccgtccccgtggcaacgccccccgggaatgatggaagacttcagctggaagctggaagccgtccttcttagtttgcttgtggcctcttaccttgactggcttctaaaaccctgccaaatcctgcctcttctttcaggaagtcttccggcaacccctcatctaaagctctgtggtagagacagctacttactccccagtgtccattcttccctttctttttatctttttccttttttattttttggagacagagtcttattttgtcacccaggctggagcgcagtggcacagtcttggctcactgcagccttgacctccagggctcaagccatcctcctgcctcagcacccccgccccccacccccaaatagctgggactacaggcatgtgccaccaagcctggctaatttgtagagatggggtttcatcattttgcccaggatggtctcaagctcctgagttcaaatgatcctccagccttggccccccaaaatgctgggattacaggtgtgagccacagcgcctggcctcccctttgcttgtagtaagactcctgtttgtttcaaacgaggcacatgcttaactagaaaagaaaaaaaagactacatttcccagaatcctttgcatgtcgtacagccatgtgactgcttctggccaataaaatgtaagtggcagcaatcaatgtaacttccttgaagagccattaaatggaagaggcctgtcctccatttccccatctccccctttctattgtccagaatgcaggcataccagttagctcttgttgcgcaacaaacaccatcaaagtttagaggcttaaaaacataaccattttttttatagtgtcttgttctgttgcccaggttggagtgcagtggtgtgatcatagctcaccaccacctcaatctcccaggctcaagtagtcctctcacttcagcctcctgagtagctgggattacaggcataccccactgtgcccagctaatttttttttttttttcttgagacggaatctcactttgttgcccaggctggagtgcagtggcgccatctcagctcactgcaagctccgcctcccgggttcacgccattctcctgcctcagcctcccgagtagctgggactacaggcgcccgccaccatgcccggctaattttttgcattttttttagtagagacggggtttcaccatgttagccaggatggtctgtatctcctgacctcgtgatctgcccgcctcagcctcccaaaatgctgggattacaggcgtgagccactgcgcccagcccacctggctaatttttttaaaaaagtttttgtagagatggagtcttgctatgttgcccaggctggtctcaaactcctggcctcaagcaatcctcctgcctcagcctcccaaagtgttgggattatagacgtgagccaccacacctggcttcataaccttttatgatttctgtggatcagcagtttgggctgggctcagctcagtagttttctcatcttgcgtctgggtttctttatgcatctgtgggtcacctaagtgattctgcttctgggagagtggctggcttggggtgatgggattggctaatccacatagctcttatcatcctgcaggctggctttttcgtttgatggttggggagggttccaagagtaaggaaagtatgaggcggaggctcagaactttgcacaaggtgactagcactcaagctactggtcaaaaagcaagtcacgagcctggcttagattcgaggtgtgaggaaaggactccaccccttgatgggaaaatctaaagagtgacattgctaaggagcacgtatgcaggaaggtgtgcagaacgggggccatttgtgtaatctgccacagcagccctgatgcaaagctaccgtgtacccagggagtccctaggccagccctgagatgcttacacccaggttgtgaaaggggaggtttcaaattccagctcattgaagccactgttattttgtgtctctcctgcaacagctgaatctaccccttaactattaattatgctgccaaactctggaacttgtgtaaagtgacttaataaatttccttattgttgaagccagttggagtcaggttttctgttacttaaaacccccccaaaaaaacaaactggtgcatgtgaagaatagtcctttctggggattgaagtcccagtggtccctggtcacaacaggccattcccttggctcttaagtcgaggcaaaagaaaaatgtcatgcaatccagaagctgtcacaccacttgctcatgattcaaagaagtaaatctgcccaggtggggtggctcatgcctgtaatttcatcactttgggaggctgaagtaggcggatcacttgaggtcaggagtttgagaccagtctggccaacatggtgaaaccccttctctatgaaacatacaaaaattagccagacgtggtggcaggcacctgtagtctcagctactccagagacagaggaaggagaatcgcttgaacctgggagacagacgttgcagtgagccaagagctcgtcactgtactgcaggttgggtgacagagactctttctcaaaaaaaaaaaaaaaaaaaaaaagcatctatgacttgccatgagaactccacctctcagagactcatttgcccccaaatctataaaataggaacaaatgtttccatcttctggatgaggagaggattaaatgacacagtgactgagtgccaggaagcacagagtcaccttaaaaaaaattaactcctgggccgggcagggtgactcaagcctgtaatcccagcactttgggaggccaaggtgggcggatcacctgaggtcgggagttcgagaccagcctgaccaatatggagaaaccccatctctactaaaaatacaaaattagccgggcgtggtggcacatgcctgtaatcccagctactcgggaggctgaggcaggagaattgcttgaacccaggaggcggaggttgcagtgaggcgaggtcgcaccattgctctccagcctgggtgacagagcaagactccgactcaaaaaagaaaaataaaaagaaaattaaaaaagcattggattgtattttttaggcggtgtcttgtctttctggtgacacctgttgacatgatgtgtcttagagtcagtgaaatgttacccgtgaggccacagtattctcctgaggaaataaagccatgcacagcataacgaggtttctgtcaatgacagactgcacgtccgacagcggccccaccgattataatggagctgaaagactgcagttgcccggtgatgttgtagctgtcctaatggagtagctcaaggcgttactctaatgtttgtgctgatgctggtgtacacagacctacttgaccgccagtcgtataaaagcatagcacatacaactgtgtacagtacgtcatactagtccatggcaacaggcaggacatggtggctcacagttataatcccagcactttgggaggccgaggagggtggatcatgaggtcaggagatcgagaccatcctggctaacacggtgaaaccccatctttactaaaaattacaaaaaattagccgggcatggtggcgggcgcctgtagtctcagctactccggaggctgaggcaggagaatagcatgaatccgggaggcggagcttgcagtgagccaagatcgcgccactgcactccagcctgggtgacagagcgagactccatctcaaaaacaaaaagtaataataataataatgagagcagtattaacaatagagagctaacaatgcctgagcgcctactatgtgccaagaagttttttttgttttgttctgtgtttgctttgtttttgtttttgattattctcactgtcgcccaggctggagtgcggtagctcaatctcgactcgctgcaacctccgcttctcagatttaagcgattctcctgcctcagcctcccaagtagctgggattacaggcacccaccctgatgtctggctaatttttgtatttttagtagagacagggtttcgccatgttggccaggctggtcttgaactccttgtctcaggtaatccacccgccttggcctcccaaagtgctgggatcacaggcgtgagccaccgagcccggccgcaagaagttttaagtgttttgtatctcttaacaaatttcattagcacaaggagggcagaggagaattggaatggccttgcggaaagacctccctgtcacccgcctcctccttatgccccaagcctgcagcccctggggcctattattagggcccacatctggtgacatttcccggactgatagcgatctctgaagctcttgctcaaggttctttcctggacatttatctgctccaaaactcacagctagcttcctgccatcagccccctacctttaacgtgggctcaaggctggcggttgcctgggactgacgacggagcagagaaagccccctcatcttgctttcatcctcggacacagcacaaggtgacaggggactgggatttgttgggaggatctcagggagccaggaggtaggagcttggggactaagagagttgaagggcactttccagggtatacaaaaaggagctggcgggctgggtgcggccgctcatccctgaaatcccagcagtttgggaggctgaggcaggtggatcacctgaggtcaagagttggagaccagcctggccaacatggtgaaaccccgtctttactaaaaatacaaaaattagctgggtatggtggcaggtgcctgtactctcaattactcaggaggctgaggcaggagaatcgcttgaacctgggaggcggaggttgcagtgagctgagattgtgccactgcactccagcctaggcaatagagtgagactctgtctcaaaacaaaacaaaacaaaacaaaaagaggtggcaaaaaggggctgaaagttctgggccacctcctctgggtgaggaatgttctcatgccatatgcgtgaactgtgcctgatcagaggtatttgactgtcttcatcactgcggtatccccagcgcttaggatagtgtatggcgtacgatttgggctcaatgcataattttacactaaatgaatgaatccatcctcagatgacaaaggagagattgtcctccttaatgatcactcatccattatttaccaagtgcctgctgtgttccaggggccaggagcaagccacacaccagcctcgcctctagggaacccagagatgaataatgcagatgggtgatcaccaaatgaccaaacaaacggtctaattgctgctgcctgtaactagctctttttttttttttttttttggttgaggggagatcagagtcttgctctgtcacccaggctggagtgcagtggcacgatcatggctcactccaacctctgcctcccgggttcaagcaatatctcctgcctcagcctcccaagtagctgggattacaggcgtgtgccaccttacccggctaatttttgtatttttagtagagacaggatttcaccatgttggccaggctggtcttgaactcctgacctcaggcgatcctcccacctcagcctcccaaagtcctgggattacaggcgtgacccaccatgcccagcctgtaaccatgtcttcataggagagaaggtcctataggagggcctgattcatcaaggtggctgggaaaagctttggggagaaagtgaaatttgcactgagatctcaggaaggagttaaaaaaaaaaaaaaagcagaggaaagaaagggtgctccaggcagaggggcagcacatgcaaaggccctgggtgggagggagacgagaatcttggcaatggacacaaaggtagggaagccgggatttggtgcacaaagagggggaaggtgcaagagaagtctggagaggccagcaggtgccccagccctcaccagcggtgtcggggagactcatatttatcccacaagcaatgaagagccacagtgtaattttccagtttgaactgtatttttttttttttgagacagggtctcactctgttgcccaggctggagtgcagtggcacagtcatggctcactgcagcctcgacctcctgagctcaagtgatcctcatgcctcagcctcctgggtagctggaactacaatgcaagccaccctgtttagctaatttatttttattttgtagagacagggtttcgccttgccgcctagactggtcttgaagccctggcctcaagtaattctcctgcttgggtctcccacagcgctggggttacaaggtttgggctttcaaagcatcactctggctgtagggtggtgagtggctggtaggagataaatataaagctggagtccaggcacggtggctcacgcctgtactccccacactttgggaggccgaggtgcgtgaatcacccgaggtcaggagttcaagaccagcctggccaacatggtgaaaccccgtcgctactaaaaatacaaaaaatagccaggcgtgtccctggggtgcgtctcaactatactacttaggaggctgaggcaggagaattgcttgaatccgagaggcagaggttgcagtgaaccaagattgtaccactgcactccagctcgggcaacagagcgagatcctgtctcaaaaaaaaaaaaaaaaaaaagctggggccctgtgtgcttgggtgatagggctatggagacaggacatagtggacagaggcaagaggctttttggaggcaaaattgacagggctttttgatgaattgggtgtgcgtgttgagggagtaggagagagaggtattcaaggattctacacccctatctcagatgagcatagtgaggctcggggtgcaggggaagccctgagcccaagatcacacagtcataatccagtgtctcaactagagcttcgacttatgcctgtctgctgtgtaagctcaagctttcctcaaccccagacctctcttctctgtctgcacctcacccttggaggacattctcaggctcaaagacgtaaatagcatctaaatgttttttgtttttttttttgtagaggcaaggtcatgttgtgttgcccaggctcacgcaatcttcctgcctctgcctcccaaagtgctgggactacagaggtgagccactgtgcccggctggcatctaaattctaacgacttcgacatgcccgtatccagccagaaacccctctgtaatttttttttttttgagtcttactccgtgacctaggctggagggcagtggcgccatcttgcctcattgcaacctccatctcctgggttcaacgaattctcctgcctcagcctcccgagtagctgggattacagccacgtgccaccacacccagctaatttttgtatttttagtagagacggggttttgccatgttggccaggctggtctcaaactcctgacctcaggtgatccacccgcctcggccttccaataagtgctgggattacaggcgtgagccaccatgccgggtcccctcctgtaatcttgctgctggtatccagctgccttagtgaagtttccccgggatgccttacaggcatttcaaaggcgaagtgaccaaccccgagctcctggtcttaccccaaacctgctctcctgccgtctcccctatcccagtgcacagcaactccagcttccatcggttcaaaagtcctgcagtcaccccgacactgctctccctctcacctcacacatccagcccagcagcaaatctagccagctccaccttgaccctggaatctgcttcccaccccctcctctgacatcaccctggtccccatccccatcactgcccacctgggttactgcagcagcttcctcccggcctcctgcttccatcccaccccctcagtctagtctcaaccttaaagtcacagtgattgttaagacctaagtcagatattgttccttctctgctcaacagtctcttgtaactcccatctcactcacaggaaaggccaggagagtctgcactatgactcacagggtcctgctccatctgcccgcttccctctctgccttcacctcttacctctcttcccattgcccacgtggctccagccacaccggcctccctgctgttccttgagcattccaggcaccgtcctgcctcaggactttgcacaagctgctggttctgcctgaagggctcttcctccagatacgtatgtgcctcactactttgttatctcctccaaatctttgctcaaatgttatattctttttttttttttttgacatggagtctcaccctgttgcctaggctcgagtgcaatggtgtgatctcggctcactgcaacctctgcctcccaggttcaagtgattctcctgccccagccctctgagtagctgggattacaggtgggagcctccacgcccagctaattctttgtatctttagtagagacggggtttcaccatgttggccaggctggtctcgaactcctgacctcgtgatccgcacctctcagcctcccaaagtgctgggattacaggcatgagccactgagcatggacaaatgttacattcttatcggggtcttccctgaccaccctgtttaatgtaccagtggcccctttctgtctcatccttcacattcccagttgtccttatcttgattttttttttttttttttttttttggtgacagagactcactctgtcacccaggctggagtgcagtggcctgatctcggctcaccacaacctccagcttcccagattcaagcgattctcctgcctcagcctcccaaatgcctgcgatcacaggtgtgtgccaccgcacctggctaatttttttatttttattagtgacggggttttgccttgttggccaggctggtctcgaactcctgacttcaagtgatctgctcacctcggcctcccagtgtgctgggattacggatgtgaaccactgcgcttggccttaccttgatctttttctaaagaaaacatttcatgatcttcatttcttcctgtcaatatgtgtcaccatgtgatattaactcctttcagcctagaggacttacttccttaagcaattcctgcggtctgtaggccatatattatttcagatctggcttatctgaaaatgcccttttttcactttcatttttgaaagatattttcacagaatataaaattctggattgacagacttttctgctgccaattttttcaaatagtggagtaatttttaatattttgtccagattttaattttttttttgtctgtggcaccatttgtctgacaaagttactctgacattatccaaagttaaaagaacctccatctcattatttttactttatttttattgagacagggtctcgctttatcacccaggctgaagtgaaatggcgtgaccatggctcattgcagcctcgaattccagggctcaagtgaccctcgtgtctcagtctcccaatttgctgggactacaggcacgtgccaccatacctgactaattttttttttttttttttttgagacagagtcttgctctgttgcctgggctggaatgaagtggcacgatcttggctcactgcagcccctgcctcccaggttcaagggactctcctgcctcagccttcagagtagctgggattacaggcacgcaccaccaagcctggctaatttttgtatttttagtagagacaggcttttgccatgttggccaggctggtctcgaactcctgaacttaagtgatccaccagcctcagcctcccaaagtgctgggattacaggaatgagccactacgcccatctcacggctaatttttaaattttattttatttttatttttttgagacggagtttcgctctcgttacccaggctggagtgcagtggcgcgatcttgattcactgcaacctccgcctcccaagtttaagtgattcttcagcctcatgagtagctgggattacaggtggctgccaccacacccagctaatgttttttgtatttttagtagagacggggtttcgccatgctgggcaggctgatctcgaactcctgacctcaggtgatccgcctacctcagcctcccaaagtgctgggattacaggcgtgagccactgtgcatggccacaaaaacttgtaattatttattttttgtagagacggtctcactatgttgcccaccttggtttggaactcctggcttcaagcaatccttctgcctcagcctcccaaagtgttgtgattacaagcatgagccaccacacctggcccctccatttcatttattatttttccataacacttgtagtcttctaaagcagtatatcatgaagtaaatttattatatgtattacacctgacatctctcactgggatgtaagttccatgagggcttgttttgttacacgagttatgtccagtacttagaacaatattatagtgtccagtgagccgagatcgtgccattgcactgcagcctgggtgacataaggagactctgtctcaaaaaaaaaaaaaaaaaaagaacaatattattgtgtcataaaaagcattcaggctgggctcaatggctcacacttgtaatcccagcactttgggaggctgaggtgggaggatcacttgaagccaggagttcaagaccagcctgggcaacacagcaaaaccccatctctacaaaaaagaatttaaggcctggcagagtggctcacacctataatcccagcactttgggaggctggtggacgggtcacgaggtcagtagttcaagaccagcctggccaacatggtaaaaccctgtctctactaaaaacagaaaaattagccaggtgtggtggcatgtgcctgtagttccagctacttgggaggctgaggcaggaaaattgcttgaaccttggaggtggaggttgcagtgagccgagatcataccattgcactacagcctgggtgacagagagagcaagactctgtgtcaaaaaaaaaaaaaaaaaaaaaaggtaaaaaaattagccaggcatggtggtaagtgcctgtagtcccagctactccaggaggctgaggggggaggatctcttgagcctaggaggtggaggctgcagtgatctgtgattgtacctttgcactccagcctgggtgacagagcatgacgctgtctctaaaagaataataataataagcattccataaaaattatggaatggagaaatcatgaatggggtctcggaggggaccagaggctgcagtgacaggcaacctggggtcctgacacgtgatcgctcttgttccaggaagatgaactcttccggatgcctgtctgaggaggtggggtccctccgcccactgactgtggttatcctgtctgcgtccattgtcgtcggagtgctgggcaatgggctggtgctgtggatgactgtcttccgtatggcacgcacggtctccaccgtctgcttcttccacctggcccttgccgatttcatgctctcactgtctctgcccattgccatgtactatattgtctccaggcagtggctcctcggagagtgggcctgcaaactctacatcacctttgtgttcctcagctactttgccagtaactgcctccttgtcttcatctctgtggaccgttgcatctctgtcctctaccccgtctgggccctgaaccaccgcactgtgcagcgggcgagctggctggcctttggggtgtggctcctggccgccgccttgtgctctgcgcacctgaaattccggacaaccagaaaatggaatggctgtacgcactgctacttggcgttcaactctgacaatgagactgcccagatttggattgaaggggtcgtggagggacacattatagggaccattggccacttcctgctgggcttcctggggcccttagcaatcataggcacctgcgcccacctcatccgggccaagctcttgcgggagggctgggtccatgccaaccggcccaagaggctgctgctggtgctggtgagcgctttctttatcttctggtccccgtttaacgtggtgctgttggtccatctgtggcgacgggtgatgctcaaggaaatctaccacccccggatgctgctcatcctccaggctagctttgccttgggctgtgtcaacagcagcctcaaccccttcctctacgtcttcgttggcagagatttccaagaaaagtttttccagtctttgacttctgccctggcgagggcgtttggagaggaggagtttctgtcatcctgtccccgtggcaacgccccccgggaatgatggaagacttcagctggaagctggaagccgtccttcttagtttgcttgtggcctcttaccttgactggcttctaaaaccctgccaaatcctgcctcttctttcaggaagtcttccagcaacccctcatctaaagctctgtggtagagacagctacttactccccagtgtccattcttccccgcccccccccccttttttttttgagatagagtcttgctctgtcaccaggctggactgcagtggcgcgatctcggctcactgcaacctctgactttctggttcaagcaattctgcctcagcctcccgagtagctgggattacaggcacgtgccaccacgcccagataatttttgtatattttttagtagagacggggtttaaccacgttggccaggatggtctcaatctcctgaccttgtgatccgcctgcctcggcctcccaaagggctaggattacaggcgtgagccactgcacctggcccattctttccctctctttttcttttttttaaaaattttttaaagacagggtctgattttgtcacccaggctggagcgcagtggcaaaatctcggctcactgcagccttgaccttcagggctcaagccattctcctgcctcaggactccccacgccccaccccccacctcccctcaccctgcctagtacctgggactataggcatgtgctacctgggtaatttgtagacacggggtttcatcatgttgcccagagtggtctcaaactcctgagttcaagtgatcctccagcctcggctcccaaaactactgggattacaggtgtgagccacagcacctggcctccccttttttggtagtaaaactcctgtgttctaatgaggcacggtgcttaactagaaaaaaggaaagactacatttcccagtatcctttgcatgtaggtacaaccatgtgactgctttctgaccaataggatgtaagaggcagcaatcaatgtaacttccttcaagggccccttaaatggaaggggtctgccctccatttccccatttccccctttctattgtccggaatgcagatgtatcagttaccttttgctgtgtaacaaaaaccttccatgtttagaggcttaaaaatataagttttttttttttttctgatagggtcttgctctgttgctcaggctggagtgcagtggtgtgatcacaactcactgccacctcaatctcccaggctcaagtggtcctctcacctcagcctcctgagtagctggcatgtgccaccccatgccaggctaattttgtattttcagtagagatggggtttctccatgttggccaggccggtctcaaaatcctgaccttgaatgatctgcccgcttcagcctcccaaagtgctggaattacaggcatgagccaccacacctgggcagaactacttctttgaatcatgagcaagtggtgtgacagcttctggattgcatgacatttttcttttgcctcgacctagagccaagggaatggcctgttgtgaccagggaccactgggacttcaatccccagaaaggactattctttacatgcatcagtttggttttggggtgttttaagtaacagaaaacctgactccaactggcttcaacaataaggaaatttatcaagtcacttcacacaagttccagaggttggcagcataattaatagttaaggggtagattcagctgttgcaggagagacacaaaataacagtggcttcaatgagctgggatttgaaacctcccctttcacaacctgggtgtaagcatctcagggctggcctagggactcccgggggacacggtagctttgcatcagggctgctgtggcagattacacaaatggcccccgttctgcataccttcctgcatgcgtgctccttagcaatgtcactctttagattttcccatcaaggggtggagtcctttcctcacaccttgaatctaagccaggctcgtgacttgctttttgaccagtagcttgagtgctagtcaccttgtgcagagttctgagcctccccctcatactttccttactcttggaaccctccccaaccatcacacgaaaaagccagcctgcaggatgataagagctatgtctctagtaaacatacaaaaattagccgggcatggtggcagacacctgtaatcccagctacttgggagactgaggcaggagaatcgcttgaacctgggagacagaggttgcagtgaggcaagatctcatcactgcactccaggctgtgtgactgagactctgtctcaaaaaaaaaaaaaaaaagaaagaaagaaaaagaaaataaaagaaatgtaaaagaaaaaaaaaaaaagcagcagctctgacttgccctgagaactccacctctcagagcctcggttgccccaagtctataaaatagaagcaagtgtttccatcttctggatgaggagattaaatgacacagtgactgagtgccaggaaacacagacgcaccttaaaaaaattaactcctgtgggaggctgagcggggaggattgcttgagcccaggaattcgagaccagcctgggcaacatgatgacaccccatctgtacaagagattggcatggtgacgcatgcctgtagtactggctacgtgggagtctgagataggaggatcacttaagcctgggctgtggaggttgcaatgagctgagatcgtgccactgcactccagcctgggtgacacagtgagtctctctctctaactctctctctctctctctgtcacacacacacacacacacagaaagagagagagagagagagagagagagagacctacctattctgttgactagtggatctgattaaaaataaataaactggggaaagtattatttaaaaaaaaaaacttgaaagtgatgagaaatagtcctccctttcattccaaatcctccattgttactttttctcacgagaaaactgttaccagttttttgtgtatccaacccatgcataagcactttctttctttctttttttttttttttttttttgagacagagtctttctctgttgcctaggctggagtgcagcagtgagatctcggctcaccgcagcctccgcctcccggggttcaagtgattctcctgcctcagcctcccgagtagctgggattacagacacccaccatcatgtccagctaacttttgtatttttgtagagacagggtttcaccatgttgaccaggctggtcttgaactcctgacctcaggtggtctgcccgccttggcttcccaaagtgcctgggattataggcgtgagccaccgctcccagtgcataagcactttcaacacaaatagagcatgccatagctatgattctacatcgtgagtattttccaaagagtatacctttgggacggcaatacataagatatctagcacatgacttttcaatggtggtggctaagtattcccttatatgtatatactgtgcacggaagtagtgttccctaatcccctactgatgagttgctttgaatttgatgcaatgatatttttgaaactttgaaaattattcaataaaacacacattctgaacaatacataaagaaaatagaatggggggaatttgtttgatttatcactaagtgaacaaccaggcaacccagccataaaacaatgtggccaccccagggctcccctcccacctcctcgccctctcagtcagtcctccatctcctttaaagataacttttgttttgttttgttttgttttgttttctgagatggagtctccctctgtcattcaggcaggagtgtagtggtgcgatctcagctcactgcaacctccgcctcccgggttcaagtgattctcctgcctcagcctccctagtagctgggattacaggcatgtgccacctcatctggctaattttttttttttttgtatttttagtagagatggggtttctctatgctggccaggctggtctcaaactcttggcctcaggtgatccacccgcctcggcctcccaaagtgctgggattacaggcgtgagtctccccaccctggccaatatatttcaattaaatatatcaatgctgatatttgtccatcctcacattttgtcggtctctctctccatctgtccacgcactgtagtacctccagtatgatgagcagacaagacggggacatgaggtctgggaaacccagggagggagccctcagcatacccactgtgctgcaaggggcacaatgctcagaggtacctcccaaaaatgttgaactgtgttaaagtcggcgcaggtaggacgtcacgatattttacctattaattcttcagcctgtatcttctaagaacaagagcattttccctgtaaaattataatattattatctccctcaagaactttaccattggtattatctaataaacaggccatattcaaatttcctaactgttccaataataaactttagagcaatttttttttttgagtcaggttcttgctttgttgaccaggcgggagtagagtggcatggtcatagctccctgcagcctcgagcaatcctcctgcctcagcctcccaagtagctgggacgacaggcatgtgccatcatgccctcattaaatttttttttgtagagacagaatcttgctatgttgcccaggctggtcttgaattcctggcctcaagcaatctttctgcttcagcctcccgaagtgttgagattacatgtgtgagccgctgcccttggcatggagcattttttaaaaagcaggatcctgcaatgatattctctgcctctccttgaaaaaaaaaaaaaaaaaaaagactatgcattaggtcacaaataaaacataggttgattccccaaagcagaggtaatacaggccatattcaaatttagaaattaataacaaaagatgaaaaaaatgcttcaattgccttggacattgcaaaacacccttctaaataacatcttggttcaactgttaattaaaacttaagttctacttcatttaaagcacactacatataaaaacttacggccaggcgcggtggctcatacctgtaatcccagcactttgggaggctgaggcaggcagatcacctctggtcaggagttcgagaccagcctggccaacatggtgaaaccccatctccactaaaaatacaaaaattagccaggtgtggtggtgcatgcctgtagtcccagctactcaggaggctgaggaaggacaatcacttgaaccctggaggtagaggttgcagtgagctgagattgtgccactgcactccagcctgggtgacagagcaagactctgtctcaaaaataaataaataaataaatatttttaaaaaatcttatgagatggggccaaagctgtgctcagaggaaaatctatagcttatttatttgttttgttgttgttgttgttgtttatttgagacagggtctcactctgtcacccagactggagtatggtggcaccattgctcactgtagcctcaacctcccaggctcaagtgatcctcccacctcagcctccccagtatctccaccatgcccagctatttgtttaattaattaattaattaattaatttattggtagagatggggtcttgctatgttaccaaggctgatctcaaatacctgagctcaagccatcgtcctgccttggcctcccaaagtgttgaaattacaggcgtgagccactgcactcagcctttaatttaattgtaattagaagagagagagagagagagagagagagacagagagagagaaagtccgagaggaaattagcaaagcaaacaattcaggaagaaaaaaaagctataaaatagtgcactgaaagttgaaagaaagcgttcatagagattagagggagttaattttaagtaaaaaattatggacaatagtaagaagctggttctttggaaggagaaatactcttttccatgttctgtctctctctcatgtgtgcacacaggtacacacacacaaaaccaacaataatattcttttacgtttgtgtttgtgtacttttgtgaatgcttcaagaaggcagaagagcacaatgggacacaagttgcttccactctctgtgcctcagtttccaccaatgtaaaatggggataatggcagtagctccctgagagggtccctgtgaggatgacttgcgttgccgtgggtggggcgcttggctccgtgcctggcaccgaggaggtgcgatgtgtttgctgtgatcagtatcatcctctgttgcataaattcctcctggggaactgccgggttagagggagtgttcgatgtcgcagacgccgccgcgagcgctctgcaagcctgtttcccacggcttcgccaacgcagcaaccgccaagtcagcctctttgatctttgccttctcagaggagaaaagtgggatcccggggaggtttttaatttgcattgattttctaatgaatgcggttcagcattcttccaaggaggctctgcggtttttagagctggctgcaggatcctccctggggagacgtggtctttgctggggcagagccaggcgcggtggtggaggtgggtttgagtctcggggagcgcgcgggagctgggcacggccccgtgcttgagaggatctggcattttcctgggcagcctcggcgagagagagtcgtggaaggtgagttaagcctccggattatactctgccaagcagggactaaaaattcgtatccaacagaattgctaagacagctgaagactgcgattcacgccttcatcccttaaataatgacagctcacaggtattgatcgtgacctaagtaccaggccctgtccagagctttctaaacatgtgaactcccaaagtcagcatcacaaccctgagggcggtgctgcgattattcccgttgtacagaggaggaaactcgaggctcagagaggtaaagtcatttaccgaaggtcacacagctggctgggtacggtggctcacgcctgtaatcccagcactttggaaggctgaggggggcggatcacctgaggtcaggagttcgagaccagcctggccaaagatgaaacccccgtctctgctaaaaatacaaacattagccgggtgtagtggtgcatgcctgtaacgccagctactctggaggctgaggcacgagaattgcttgaacccgggaggctgaggctgcagtgagtcgagatcgtgccactgcactccagcctgggcgacagagtgagactccgtcttaaaaaaaaaaaagaagaaagtcacaaagcaagtaagtgtaggatgggaatttgaccggtctgactccattaacccatccagttatgtttaccgagcgcctgtctggtgaaggtcactgtttttggtgtgggagaaaggcaaagaagacaaagatacctacctttgaaggactagcattctagggagtagcactgacatgccgggggcagtggctaacatttaagggcgaggggctagcatttagggggagtggataactttaggaggcggggctaaaattccaaagggagaaactgatcttccagggaaagaaattgacattcagaggggagggactaacatcccagggggaggagctaatattccagggaggaggagctaacatttcaggaggaggggctaatatttttagtacaattatacactgttaatcactacctctgtttctaacattttagggtaattgcatgctcttaatcactacctctgattctctcaggcaataaaggaggggccaacctttatgagggagggggtaatatgccaaggggaggaactgacaatccatgggaagaaatggacattctagggggaggagctaacaacgaggaggggctaacatcgcaggagaaaaattgacatttaagaggggagaagctaacatcgcaggagagaaattgacatttcagaagggaggagctaacatcataggaaagaaattgacatttcagggggaggagctaacattgcaggggagaaattgacatacaggaggaggggctaacattcaaataagggtgctaacattcagtgggagaggctaacattgcaggggagaaactgacatttcagggcagggctgacactctccatccttcagattctacagcctctgcctccttgctataccctgtccctacaagtattggctgagctcatagtaggtgcaaatctctgccaccctggggatttgaacatgcctgaatagaatggagtctgccctcatagagctcgcagcctgggggcagacagttctgaacggaatgattacacagaaagacattcacctcccaggcaggagaggtaatcacgcgctcttaatcactacctccgtttctctcaggcaatacgggaggggaggcggcacccccatcgtggcctggtttgagatgttcccagccgtaggagacagactgtcatcaagtgtcggaaaatagctgtcatgggaatcctcacctcctgacaccttcccagccccgtgctcccgaaaccctccccgcgtggctgcagagttgtaggttctgctcctggtgacgggcaaccccgtaatctccaatgctcacggcagctctgctggggcacagcagctcctgggggccaaggtcccagccaggacgtggatgtcagggccgagactggaatgtagaaccgtgggagtccagagcccaggtccttccccacgaaccaccagatgtggtgtgggtttcctggtttccgttcttgttcaagtggaataaaaggaaaaggtgggggagtgacagccacacctaatgtccccccaccatggtgggggatttttgtctgttccctttgctgccgtgtcccccgtgcctgggatgcgcccagtgctgaacgatgcccctttgcacatatacagtctcacgctgattgatctgggtttactaagtgtcagtgattcactcccttgaaaatgggagccccattttcaatgtgtgactcccattgtgatcgtaggttctggggacccacagaggacaggcccagaccctgatctcaaaaacgcctcagaggccaggtgcggtggcttacgcctgtaatcccagcactttgggaggccgaggtgggtggatcacttgaggtcaggagttcaagaccagcctggccaacatggtgaaaccccatctctacttgtgtgcaaacagagcttgctggtcctcgcacatgggacagaatgagggacaggagcaggccaccggcttttctggtttctgaaggagtctgttgtgaaatatgcaagtgccttccgaccatgcgcaccaggccctctgccctggggaacaatgtgcttcacgttccttcattttcaagctcctgaatgtttccaaactaaaatgtaaatttggccccatgttttgagtctttgatgtatccacggagctccctctgaaatgcactcagctccaagaggaggaaaatcgacctctgtcttctgggaacgcattacagcgagggctcttgaccctggctgcacagcagaatctctagggagagcttttaaaataaaatcgatgcccgggccccatccccagaccttgtggtttaagtggtccagggtggagctcggctctgggaatttcaagacctccccagggatttctgcgggcagctgggctgagacccatctctctgtggttgtgaaaatacaacctcgggccaggcatggttgctcacgcctataatcccagcactttgggaggctgaggcaggcagatcacttgaggtcaggagtttgagaccagcctggccaacatggtgaaaccccgtctctactagaaatacaaaagaaaaaagaaatgcgagcatggtggctcaagcctgtaatcccagcacttcgggaggccaaagcaggtggatcacctgaattaaggagatcgagaccagtctggccaacatggcgaaaccccgtctctactaaaaatacgaaaattagccgagtgtggtggtgcacacctgtaatcccagctacttgggaggctgaggcaggagaatcgcttgaacccaggaggtgaaagaaagttgcagtgatccaagatcttgtaactgcactccagcctgggtgacaaagcaagattccatttccaaaaaaaaaaaaaaaaaaaaaaagagaaaaagaaataccaaaaaaattacccaggtgtgatggcacctgtaatcccagctactcaggaggctgagacagaagaatcgcttgaacccggaaggtggaggttgcagtgagctgagatcgcgccactgcaccccagcctgggcgacagagcgagatttcgtcttaaaaacaaaaaaaagaaaaagaaaaagaaaatccaaccttgatagctcccagaggactgagaaaggcagcactgagtggttcaaaccctggggtgcggatgggaaactggggtgaaaatgcaaagaccagctttgttgtcaatattcgttagtggtggtgggggtgctgtggctcatgcctgtaatcccaacactttgggagaccatggtgggaggattgtttgagaccaggagttcaagaccagcctgggcaacataaaaagacctcatctctactaaaaaaaaaaaaaaaaaaaaaattgccaggcatagtggcgtgcacctgtggtcccagctgctaggaaggctgaggtgggaggatcccttgaacccaggaggtagaggctgctgtgagccacgatcacgccactgcactccagtctgtgtgacagagtgagaccctgtctcaaaaaaaaaaaaaaaaaaaaagaaaactgtgaactgttgcacaaatgtaaggtttgatgttatcttcttccatgtactgtcaactccttaagggtgggaatggtgtcttttttttttgctccctccatggcaccccccacccccatcctgcgctcaacacaggactgggtgtagagatgacctcataaaacacactgcacggtaacttgcatggtggcttagcaaacaagaggtgcttaataaatggtagctaacgacaatgaaaaaaagtgtttcccaaacgttgacagccaagccccaactgtgggttcagcaggggtcagatgctgttcagagcgaccccaccctgaagctccctgtcacagccgggaataaggggaggcaaagttggggcagcagacaggagagtctgactttgcttagcgttcaaggaagcctcaggggagaggtagggaagtgacacaaaacagacatgggaggctgggcgcagtggctcctgcctataatcccagcactttgggaggccaaggcgggcggatcacctgaggtcaggagttcgagaccagcctggtcaacatggtgaaaccctgtctttaccaaaaatacaaaaatcagctgggcatggtggtgggcacctgtaatcccagctactcgggaggctgaggcaggagaatcgcttgaacctgggagacggaggttgcagtgagccgagattgcgccactgcactccagcctgggcgaaagagcgaaactccgtctcaaacaaacaaagacatgggaaagggcattccaggctgggacccagcagtgcaaacgcgtggtgctgcatttgggactatcttcgagttcgccgtggccaagaatacaccagggtgggcatgggaggtgggtgagattttttttttttttttaagcctggagggggtcaggttacatgcagcctccaatgctcagtggagggcctgggattcttatcttgggtgggggcacagggccactggagggctgtgaggagaaagggacagggtcagctctgggtcccggaggacccctctgaggactggaggagagagagagaaggctggggtgagggtccagtgggggaggaagcccaggcagggaggagggaggaagtggccaggaccccccgccccccggtctcaaaaaattgtggttttgagtgagactctgtctcaaaaacagacagacagacagacaaacaaacaaacagttgtggttttgccaaaaccaaagttatttcttgcgctcaacccttaaggcaaccaatttctggctgagaaaatagtgcaacaccgccactatgtggttatttggagttttgcagccaagaatttgaaagtaaagccagcctccaaatcgggaagcttttgagaacttcaggagggcactattgccactgacgctaaaacattagcctaaaatgttggtgatccacaaaacttctattaattcgagataaaattatagtgcaactatgaatgtttattactgaaatttggggccaagcgcggtggctcacacctgtaatcccagcactttgagaggccgaggcgggcagatcactaagttaggagttcaagaccagcctggccaacataatgaaaccctgtctctacaaaaaatgcaaaacttagccaggcgtggtggcgggtgcctatagtcccagctacttgggaggctgaggtaggataattgcttgaacctgggaggtggaggttgcagtgggccgagatcgcgctagtgcactccagcctgagtttaacagagcgagactccatctcaaataaaatacaataaaataaaaagaaattggtgaggccgggcacagtggctcatgcctgtaatcccagtactttgggaggctggggcaggtggatcacctgacgttgggagttcgagaccagcctgaccaacatggagaaaccccatctctactaaaaatacaaaattagccaggcgtggtggcgcatgcctgtaatcccagctactcgggaggctgaggcaggaaaattgcttgaacccaggaggtggaggttgcagtgagctgagattgcactgttgcactccagcctgggcaacaagagcaaaactctgggaagaaggaaggaaggaaggaaggaaggaaggaaggaaggaagggagggatggaaggaaatttgttgggctttttcaggaaaacctagcacgtgcagtcaaccctactccaaagctggcttttcagatattgagctgaaatgaaattgcttttgactagatgagaaggtaggtgaaatgcaattgaaggtggaagtgtcccccagggcattgacctgaggatgctggaggtagaggcagggggtgggggaagggcgctaagcaagggggctgctagcgaactgcctgtgggggcgggtctgcacatttttataggaagggacattgctggtgggtgttgaaggttaaataggagtttgttaagaaaagaggctgagcacagtggctcacacctgtaattccaacactttgggaggctgaggtaggaggattgcttgaggccaggagttagagaccagcttgggtgacatagtgagaccctgtctctaaaaaaaattaaaaagttagctgggcatggtggtgaacacctacagtcccagctactcaggaggctgaggcaggaggactgcttgagcctgggagttcagggttgcagtgagctatgatcataccactgcactctagcctgggcaatagagtgagatctcatctcaaaaagaaaagaaaaaagaggaagatgtgttgatacagtatgacagtgatgaagatgatgacgataactacagacccactgcagctgacaaagtgcattcacattttggatctctggctgccctggctgtggttttttggggcccattggacaaagattttcgcctttgtctgatggagaagaaatcacgggatcaagggaaataacaaatccgaagtacacagcagcctgtgttggtgccgggtgctcaatgtgccctgcttgttcttccctctgtgcccttacaccaggttgaaatgttcttcctcttcttggaatttccccacagactcctactcatccctgaaaacccagcgcagattcccagctcctagcctcaaacctgcgagggtgggtcctcaccactctcctacctcagaccctggagtccggacccccaccccactcccttctgaaacacagagccccaggtgtggtgtaggcccgaggccgggcgcaagggcagtgggtcggcggagcaggatgtgcggattcagttacatttatctggcctcagagcgatggcagagggagaggcagggctcttgtgcggggaggtcctgtgtcttctcactgctgagcctgagagaggaaaacagggacatatacagagatgtgggagagaaagagagaccaagatgacagaactggaccagggagacagagactcagcccccacctccgctcttctcccgctcaccttgttgaagaaatagatggaggtcaggatggtgaacaaggccatggccagggtcacattctgggggggagatcagaggtcaggacccttcccctccctgccctctgcccagccccaggcctcccttccctgccagacccctcctcacttcctgaaagttcatggccttgggactccagccaccccttggttggtcttctctctctttcctgggcctctgagccagaggggggagaagccactggaactccgagagggggttgtcggagagaccagaatggtggccatggcaacggggaaagggcattctggtagaggggacaggcaggggcatagggcagatacagaccctggtgtggcccgccacatgtggtgtctgaatgtgacatcgggacgtgtgagattggagagtctcaaccctgaacaccatactgaggtgtttgggttttgccccggagggtgctggggagccatgagagggttgagagcaggggagggaccaggtcagttctgggtatagaaatatctcaaaacaggagcctgcaggccaggagaacagtaagggaggcccaggcaaaatttcctcctccagatgggaggatcacttgagcccagggggttgaggctgccatgagccaagatcacgccactgcactccagcctgggcaagagtgagatcctgtctccacaactaacaactaagaaaaaataaaataaaatacatatgatacatttgtgagatacctatttacctatctatcgctaccacaaaaatggggactatacaatctgctactcaggtagctatttgcgttatttgtggcagatatagtctcgctatttttggtagttatgttgtacaactgtgaacacttattggggaaatatatgtgtgtgtgtgtatatgtatacacacacacacacacacacacacacacacacacacacaaacacatatatatagggttgggtgcagtggctcatgcttgtaatcccaacactttggttaagtgagacagtagaattgcttgagcccaggagttcaaggccagcctgggcaacattgtaagaccccatctctttaaatatatataaatataggccaggtgccggtggctcacacctgttttcccaacactttgggaggccggggcgggaggatcacctgaggtcaggagtttgagaccagcctggccaacatggcgaaactccatctctactaaaaaacaaaaaaacaaaaaaattagccgggcatggtggtgcacgcctgtagtcccagctatttgggaggctgaggcaccagcaacacttgaaccccaggcggaggaggttaaattgagccgagattgtgccactgcactctagcctgggcaacagagcgagactccatctcaaaataataataataaataaaaataaataaataaatagaaaataaatagaaaaatatatacttttattaatgaagcaatgggtccttatttgctgattcagtggtcacagttatacaacatcgctactatgaataacaagaattgattgtaaacacggtacctcacggcactacccagaacattccagaaggcaacacattctgcagagcaaacggcaccgtctctccaacaaatccatgccacagtgcaaaacaaaagcaagtagccttgctatatttgaaaaaaatccgttaagagacacaagaccagctttgaggggtgatcctggaccgggttttggcttggacaaaacaagttataaaggctctttgtgggtggaggccgaggtgggcggatcacctgaggtcaggagtttgagaccagcctggccaacatggtgaaaccctgtctctactaaaaatacaaaaattagccaggtgcagtggtgtgcacctatagtcccagctactcaggaggctcaggcacgagaatcatcagaacccaggaggcagaggttgcagtgagccgagatcgtaccacagcacaccagcctgtgtgacagagtgagatcctgtctcaaaaaacaaaacaagacaaagtctctttggggagaaacggagggacatttgaatagggaatgggtatcagacaagacgaaagcactactgccaaggagaagaggaggttaactgaaagacgcaggttacaaaattgcaggttctgtatgatctcattttggtaagaagtacatacatgaaaaactgcatttaaacatcaggtttcactctgtcgtccaggatggagtggagtgacagaatcagggctcactgcagcctcgacttcaggctcaagcgatgagtggctgggactacaggcatatgccactacacctggccagttttttggtatttttagtagagatggggtttcaccatgttgcccaagctggtctcaaactcctggattcaagtgatctgcccaccttggcctcccaaaatgacaggattacaggtgtcagccaccatgcctggcccagttatattgattttagacttccaacctccagaactgtaagggaataaatgtgtgtcattttaagccactgagtggtaacttgtcacagcagccaatacatcagtagataggaaagtgctgacatctccaggggctagaacgtggtttctagtttcttaattttgcttcaggatttttttctcttttctgttttttttagagacaggctcttggtttgttgtccaggctgtagtgcaaaggcacaattacagctcactgaagcctcaaattcctggactcacgtgatcctcccatctcagtctcttgagtagctgggactacaggcagatgccaccataccgtgcctggctaatttttgtttatcttttatagagatggagtcgggtgcggggggtgggtctcaccatattggccaggctggtcttgaactcctggcctcaagcaaccctcccaccttggcctcccaaagtgctgggattacaggtgtgagctgccagctcctggtctggcttaagcctccagcccttctacttctttattccaggggcctctaccctatttcaagtacgaggagagacagagattcacaaaacttttgtatctggtgcaggggctcacacctgtaatcccagcactttgggaggccaaggtgggaggattgcttgagcccaggagtttaagagcagtctgggcaacacagcaaaaccctgtctcaaaaaacaacaaaaacctaggacaggactggaggctgactgtgcgcagtgaggcaggagagccagccagccccaggtggtgctgcgaagtgtagattttattagcattgtgggatggtgaggccgcctgagcagcagacgattgccattgaaagatgacttgttggctgggcatggtggctcatgcctgtaatcccagcattttgggaagccgaggcgagtggatcacctgaggtcaggagttgaagaccagcctggccatatatatatatatacaaaaattagccgggcatggtcgcgtgtgtctgtaatcccagctactaggggggctgaggcaggaggatcgcttgaacctgggaggtggaggttgcagcaagctgagactgtgtcactgcactccagcctgggaaacagagtaagactacatctcaaaaaaaaaaaaaaaaaggaaagaaaagaaaaaagaaagaaaggaagatgacttgttatactcacagcttccccagaggagggggcatgccacaggggccacatggggacgcaccaatggtgcccaggaggtagaccacgagcaagcggcttccttgtgttttctgtgggataaggtagggtaaagagtggctggttgcgccatttcagcaggctctggggcacaggggctgtcctgagttgtccgataccctgccccgggtgatcagggcaggtggatggtggcctgggtggtgggttggctggtttgtacaggagaggcatgcgcttgggccagtccctgactatctccaggaactggtaaccctgggaggggtggtccttctacgatcagcaaggcccctgatgtcaaagcatcagagtacagaaaatcaagcacatagttactatcgtcagcctctgcaactcagggggtcaagactgttgctgagacgaacaatgtggggtgggggtctctgtccaagtctgcaaccaggttaaaggcacctgtgttcaaatcgcagctttgtctgagaaatctgtgttttctcaggccagttagggaacccttctgtgcctcagtttccccatcggtacaatggggatggtggtaagcacatcagtgtctcctggggcagcgatgaagatgaaacgaagatgaaacgggttaatccaaggctggcagaggcgctggggaatgggatctgtggcccctgggggagcgtgccagggcctgctataatgggggtgctgagtgcagggctgggacaggcggggctgcggcccagacagtgggctgagctcagcgtctgggctgggtggaaatggccggcctggggttttggggccaccctgctggacctctcctgctgctgctgctgctggtgctgccaccccgggccctgccagaaggacccctggtgttcgtggctctggtgaggcgcccccaccccggcctgcccttagctcccccagggctagccctgaccagtcctgtccccaggtattccgccatggcgaccgggccccgctggcctcctaccccatggacccacacaaggaggtggcctccaccctgtggccacgaggcctgggccagctgaccacggtgagaagcgggtaggcggtgagggcaagggtgggaggggtggggagtggtaggctgaggctgttctgtccccaggagggggtccgccagcagctggagctgggccgcttcctgaggagccgctacgaggccttcctgagtccggagtaccggcgggaggaggtagggccatagtgacccccacctggccccctgacctcccacctgtgacctccactgactacaacgctctctttgggcctccacctctggcctttgacctccatcaacctgacttgccctctacctctaatctctgacccccgatacactgactaacccacactgacttctgaccccatctcaacctgtcacatctcgacctctgacctccatcaactctgactttattttctggcctccatctctgttttctaagtcccattgactccagtcagacctctggcctctgacatttgaccccaaacttgatttcgatctttgacccttgttgacgtaacttgccctcttgacctctaacctttaacctctacgctttatcaattctgacctaccttttctgtctcctcctatgtcttctgacatcccccagctacagacagtcctcctaacctctgaagaacatgtattgaactctgactccaagtcctccaagctgccctcctaaacttgacctctaacctccagcctctactgattctgatcttcctttttgaccctcattgactcaattgaccccctaaatccaacatggctgtccagcttaggacgtccagcccaactgctcctgacattagcctctggacccttgatcccaacttccaacttcgaaggccacatgattctcagtgtctgacccctactccaaagtgaatctgaggcttctgatttgccacgacagctgacctctgtccccaaccacgaccccccgcgtgccctctctccaccccgctccaggtgtacatccgcagcacggactttgaccgcacgctggagagtgcccaggccaaccttgccgggctgtttcccgaggctgctccagggagccccgaggcccgctggaggccgatcccggtgcacacggtgcccgtggctgaggataaggtcagggggctggacccacgtgtggcgagggagggagcgggtggagagagaggcagctctgggtctggccgcctgagctggctccgagaagcaagactgtcctcgagctggtctgtccagaccagggtgagccccggcccacgctgctctcctggatctgggagaaactgcgacaaagacgcaggggccgagagcccgggttcccccgacccgctgtgagacccaaggcaaggcacacggctgtcctctctgagactcagttttccccagctgctgaggttccccatgcgcagctgtccccgataccacgagctgctgcgggaggccaccgaggccgccgagtaccaggaggccctggagggctggacggtgagcagggcggcggtggggggcgggatgcaggggatgggcctgggctcacccagccccgcgcatccagggcttcctgagtcgcctggagaacttcacgggactgtcgctggttggagagccactgcgcagggcatggaaggttctggacaccctcatgtgccaggtgagccctgccccttcccagccaagggtttaaggacacctgtttccaatcccagcttgctactcactagctgtgttccctcaggcatgtagttaatcctctgtgcctcagttttcccatctgcacagtggggatggcaacaccggtatcaacacctccccaggacgctgtgaggattcaaatgggttaatccacgcactgtgcttacaatagtgcctggtgtacagtgagggccttgccagggtttgaggctacacatttggcaactcctccccacagtcctataatcagaaaacccaaaacctgggcagcgggagctgacctgaaatgatgcaatgcttttttttttttttttttttttggagacaggatctcactctgtcacccaggctggagtgcaatggcattatcatagctcactgcagcctccatctccctggctataggaattctcctgcctcagcctcccaagtagctgaggcaggcaggggcacaccatcatgcctggctaattaaaaaaaaattaattttttgcagagatggggtctatgttgcccaggaactcctgggctcaaacaatcctttcgcctccccaagagctgggattacaggcgtgagccaccatacccagctagtactcttgctagtctttgctcactccagctcacgggaatgttctgaatcgcagggtgggagcagtgatgtgtgtgactaagggggctgccccggcccttgctgtgtgtgttccatgctgtgtggtgtcagcaccatcagacctttctaaagtccagaatgtctgagctgtgaaatacctctggccccaggggtttcagataaagccttctgggctgtgtaatgacgatgtctattattaactaataatcgctgttggctgggtgtggtggctcacacctgtaatcccaccactttgagaggctgaggtgggcagatcacctgaggtcaggagtttcagaccagtctgaccaacacggtaaaaccccgtctctactaaaaataaaaaaaaaaaattagccaggaatggtggcacacacttgtaatcacagctacttgggaggctgaggcaggagaatcacctgaacccgagaggcaagggttgcagacagccaagattgcgctactgcactccagcctaggtgatggagcaaggctccgtttcaaaacaaaaaacaacaacaaaaaaacactgttatccacatcatgatttcccagccagatccagatccggcccatggggggactcagaagagcagggggcagcacaggcctgcggggccagaggcaaactcgagggctcaggatggtccatctgtcctgtctccccacagcaagcccacggtcttccactaccagcctgggcctccccagatgtcctgcggactcttgcccagatctcggctttggatattggagcccacgtgggcccaccccgggcagcagagaaggcccagctgacagggggtgaggtgtgggtctgggaggctggggtgccttcctctgggagagtctaagctcttttttcccatcctcagggatcctgctgaatgctatccttgcaaacttctcccgggtccagcgcctggggctgcccctcaagatggtcatgtactcagctgtgagtccttgggaagcagtgccacatggcactgaggcacagggatgagggtgacagcgatttaggtgaggaagagcctgtggtcccagtggatctcagcccactgcctggggtaacccgtatctccaaaccctactctcaggctctaccattagtctggaaagagggaggtgacggtgttatgggaggaagaatttatgaataaatataattccttgttttctttaagaaactatgattggactaagcagtctgtccttccggaggagaaaggctgcttagtccaatcatattttgcacctacttgagcaatctttattaagtggccgcctgcaaatgttggtactgccttcaggatgggaggaaggagtagctttggggggttggttctaagaagcctgggggacatctggatgcgcaagtgtagtgctcaggagaaaggcctccagagagaagtgccgtctcagccctcgggtccacctgcagcatgacagcaccctgctggccctccagggggccctgggcctctatgatggacacaccccgccatatgctgcctgcctcggctttgagttccggaagcacctggggaatcccgccaaagatggagggtgagaatggtttggtgcccagggacatgggtgggacagaactctcaaagcaaggggtgatgtgtcaggcagagggcatggccaggtggggagctgcatgggatgatgctgggaggatgacaggtgggagtcagaagcccttttctccaggctttaagatcaatgacaggagggaggaggtgccaccatgtcctctctctccaggaatgtcaccgtctccctcttctaccgcaatgactccgcccacctgcccctgcctctcagcctccccgggtgcccggccccctgtccactaggccgcttctaccagctgactgccccggcccggcctcccgcccatggggtctcctgccatggcccctatgaggctgccatccccccaggtgacagtcctctgtgttggggtgggagtggagggttgccaagtcctggcactcaccccccgcgtgttctccctgcagctccagtggtgcccctgctggccggagctgtagctgtgctggtggcactcagcttggggctgggcctgctggcctggagaccagggtgcctgcgggccttggggggccccgtgtgagccagaaaccagggcttccctacccccagctgacactggaccccaacatgtatgctcagtagctgctctggcttctgtgacttactgtgcgcctgtgtgcatggggagcgagggctgtgtggagtctccggcctggaaactagtttgtgtgtgcatgtgtctgtgtgacggtggcatgagtgtgcatgcatacgtgtcacatgtgtgaacagtttctgcacttagacgcgtgcacaggtggtctgtacgtacatgctggtaaaaaacatgtctgtgacacacattcaagcacaaatgtacccatgtctgaacaagcaggcatgcctgcatggcacttttcttgtagagacaaggtctttgtggcccaggctggagtactggcatgagcatagctcactgcagctttgaactcctgtctcaagtgaccctcctgtttcagcttctacaggcgtgcacaatgcctggttaattttgttttcttggtatgttggccaggttggtctcaaattcctggcctcaagcaatcctcctgccatggcctcccaaagcactgggattacaggtgtgagccaccacacccaggtggtatgtttatgcacctttccatatgagcactggaagcaggtaggctggctgaggacatggtggaccctgtacgtacctccacttgcagcttgtgacaaggccttactcagtgagcctcaatgtggaccatgtgctctgtggagaccaggctcacaggagttggaccctcaagtctggttatttggtgacctccatagctctcaatgcaaccatgaacttgggtagagtcagagggatctggcagcagacctgagaaaggtgcacgattcaaagcctggtttccgaggctgtgcgcctctgggcaagtgataggccctgatgtgtctcacttggcagaaccacgactctaacccagtggactccacaactccaaaaattaacttcctagggacaggtagagagcagggaaaaccgatgacactctcggctgtgcactgtaactgctacaagtaatgtggaggcgctggccaatacagtagccatgaccatgtatggctatttaaatttaggttaaataaaatggagtgttcagctcccaaccatcacatgggccacacatccaccactgcaatcatttctcagatgctgatgagagctactcctcccacactcatgcagcagcaggcgctgtggagcacctgcacgggtgccctttgagcccctggccccccaaggggaggctcccatagtgtggcctagagcagagcgcccgcccctcccaggccttgccccacacccatggctgtgtggcactgtctaaccagggaacccgtagggagccctggtacagtggatgcttaataacagccacttggcccccattagatggggcagtcggagaaaggttcaaagccattcccagtgacccaggacctaaaaaaggcacaggatccagaaacgccagggagtggaagctgggacaacccttcctccacacaagggccacctgcatactgccctagcccatttcttcccagggtgctgagggcagcctctcatgcagactcatccctggggagtccccagacctgcctcactgccctacccggcattccctagaggagctgggtggtcatgggccaccccagatggatgccaggagccacgaccctgggaaggctgaggaatgaacacccctcacactttctggccctgggagggagcctggcttccttgcaggttcatggagaccccaagtgccaggtggggttacctgtggctgtgaccaactcccacctggtggcaagagcccaccctttcccagcagcctgctggaaggacctgttcagagctgggggcctgctagtgggcagaggcctgggtggctccccctggacgcagctcagcagctgaacccacagaggatgaagcaccagagtttggagtgttctgtccgctgtttaacaggggcccctgtgcccaaggcctcagctgtgaggtcagaactgctagggctcagtgagtcctcacagagctgtcacctgagattccggccccagcacaccctaaacccagaccaacacagaagccacacacagcaaaagcagacccatcagaagggactggctgcccacagcacacagccaatgcacgctttcagagaaggcatagcaacagagaccttaagagaaaacccgtgacaggccaggcatggtggctcacacctgtaatcccagcactttgggaggccgaggtgggcggatcacctgaggtcataagtttgagaccaccatggccaacaatggtgaaacctcatctctactgaaaatacaaaactagccaggcgtggtggcaggtgcctgtaatcccagctactccggaggctgaggcaggagaatcacctggacccaggaggtggcggttacagtgagctgagattgcgccattgcactccagcctgggcatcaagagcaaaacagtctcaaaaacacaaaacaaaccaatccttataaaaacggagtaaaagcttcaagatgcttttatgtcaagggtgtggggttgccctgcttggcctgcagtgctttggggccccatgtggtggaggggtgggcacccatggtacccacccaccctgctgcctgggcagaagtgcaacatggcacacgatgcctgggggatcactccccccagggactcatggtcagtgtccactcacaaggcctgcttccctcatgacatctggccagtgacacccacaggggaggttgggggcagacacccttctcttccggtacccttgaacatggtgtcagggtgtggctagctcgacggacaccgaacagctccacagggagggtagtgcccaaggctttttgcctcccctaccatgtcccgcacttcctgaatgcagctcaaaccaggagcagctcccccaggattctggcctgcttcacccctggagcaccaggccaggcggtgtctgtccttgagagccaggcccaggtctcacggtggcgtatggacagctcctccccataggcctggtcacaatagggaagcgggggtggctcctcccctagcctgcaggaagcccttggtagcccacttatccaccttctcctgggtgtgtggctcagcagccaagtccttgtgcactgggttgggtcccagcatgagcctggtggcctggcgggccctggcaccatggagagcagcctgctgccagtgatggcctggatctccaagacggcctccagcactgtcatgcccttgaccagctagtgctggtacaggacctgggtaacaggcatgtccttgggcgtcactggctcaggggcagaggacgaggttgaggaggaagctggatacccctgtccatggtgggctggggctggaagggtggctcagtggcctcgaagtgccgggaggactcccagctggcaccaggccatcagcagccgggtgggcagtgccgtgctgctgttgccctcagggccttgcagtggtagctgaagatggcaccttatcaggttggatcaggtcacccggcagcagcagctctcgagagctgaggcacaaggcaggggcccggctgtacacctgcaggacccaggagagcctgttgcagttcttgcccgaagcgccgagatagccagctcagtgtccctgcagcaggagcagaaccagctctggcccaggtgggtgggtggcagcgctttcctagccatggctgcagccacgcctaggcaggaaacagcagagtgtctggagggatgctgtcaggggaaggacacagaaaaggcacgaatgggggaaacagccacacccccaccatcacctcccggagtggggcccctcagaaccccggatgtcaaaggtcccggggtgcaccgtgtcctcaggggcagtcagagcccagtgctggacatcacggggtccccaagtgcagccctttcaagaaccctggacactggacatctcactgcaacccagccccagcccccatcccacctccgccccccaacagggttactaaggttaatgagcccagtgcttagggcagcgcctggctcagcacttgctgggcacctgtctacatctgccttctcaccaacaccaggagtaacaggcagcctcctctgttcttaatgagtgatggtcaggcccttcagcacctggaggcaggagggcacaggggaggggagaaggtcagtggggtgcagggcagccaagatacccaccagccctccccagagccagggcccctcagacccccgggtgtcaaaggtcccggggggcaccgtgtcctcagtggcagtcggagcccagtgctggacatcatggaggccccggtgccctcaccccctcctgatgtgggtcccaggaccacctactgtcctaagggggacatcacagaagagtgctgagagatcaggcaacaaactgaatgacacttggtccctgggggtgccaggctacctcccctccccatccagctcagcctgggtatggctccttgtatgatctaggcccactgacctcacccctccccgccccccagcagcagtgtttctctggaaaacgggactagagatgcctgcagacaggcacatctgtggggttcagtgagaggacggggccaaacccttctgcttgggcctcccatgcctaacgggatacccctcaatcgcctctgctgcccccggcccagctcttctaagctgctctgacttcaccagaaccttctgtgacatggggaaggggcagctgcctctcactgggaccctggcaggataagttcagtttattctccgcaaaagcactaacactgtgggtgctcgctcagtgggtgctgctgtttaacaacctcagaaacaccaaaagccccattttgcatagaaatatgctttgtaggaagaggggggtccttgtttaaactaatcaaggaaaattaaaaacccagcccccagccacaaactagccacattccaggtgtccaagagccacccgtggccagtggctgccagactggacaaggcgaggaacatttctatctggacagtcgtaaggaaggcgccggcccagaatccacaaatgctacgtgtcccttctgtctccctatcccgcatcagctctgtcgtctcacctctcacacatccctacccaactggcaccgacaccactcatgtccccaagaatcccctctaagccagccatgacaaacgctcagctccattcactaccccacagaggatctcggattaagagcacaggacccggccgggcatggtggctcacgcgtgtaatcccagcactttgggaggctgaggcgggtggatcacgaggacaggagatcaagaacaccctggctaacacagtgaaaccccacttctactaaaaatacaaaaaaaaaaaaaaaaaaattagccgggcgtggtggcaggcgcctgtagtcccagctactcgggaggctgaggcaggagaatggcgtgaacctgggaggtggagcttgcagtgagccgagatcgcatcactatactccagtccaggcgacagagcaagactccctctcaaaaaaaaaaaaaaaaaaaaaagcacaggaccctcagaaagatactcaggggaactgcaatcccagccaaccctgcccaaaagccagcttccctgccagaaatagctgaaacctccaagaacccggagaacacactttcagttctatttcgctgcagccacggttccagctcctgacacctaaggaacaaatgaaaatcttcccagagctgagaacacctgtctcttttctgataacacacactcatgcttgtctgattttgctctttgaaacaattctcctgataaagcctgttatttttattgtgaaaataggagttccctgaattctatcagtttatatataaacggttcactgcaggctaagctgtgcttaaagacacattgcattcagcctacaaaacccatgaagtaacgtgacagaatcacctggtagttactgtctcttttccactgctgagttttgacatgtttgattagttctttcccctgaaacgcaaatgcttgttccctccagtccacgcattcctcttcttattcaagccccaccttcagaaggcgggaagcgctagtgccccgggccatttgctcggtgcctgttccacagacacagcagtgaggcgcaaaagagtgatggcctggtgaatgtctccaagcctgtaaacagcagagctggggtttggacccaggcctgcctgccaagttttccatagttgtgagatgggtgtttttttttttgagatgggagtttcactcttgttgtccaggctgaagtgcaatggtacaatcttggctcactgcaacctctgcttcccgggttcaagtgattctcctgccttagcttcctgaatagctgggattacaggcatgtgccaccacgcctggctaaatttttttttttttttgagacacagtcttgctctgttgcccaggctggagtgcagtggcacaatctcggctcactgcaacctctgcctcacgggttcaagcaattctcctgcctcagcctcctgagtagctgggattacaggcacccgccaccacgcccagctattttttgtatttttagtagagatgggggttttcaccatgttggtcaggctggtcttgaacccctgacctcatgatccacctgcctcggcttcccaaagtgctgggattacaggcgtgagccactgtgcccggcctaattttttgtatttttagtagagacggggtttcaccatgttggctgggctggtctcgaactcctgacctcaggtaatccacctacctcagcctcccaaagtgctggaattacaggtgtaagccactgcgcccagcctgagatggtttttgtatgtaaacactgagtacaatcattggcacatcaatcagtttctagaggtacggtatgaagtcaacctagacagtgagatattttaaacccaggtgagtgaaggagcaggagcaagggttcttacctggataggcatggtgggtggtcctaagcttgaagctgcacctgtaacacagaaagacacagtgagagtgggggaggaaacagtctgcaagtccacaagccattaaaactggggcccctcagacccccaggtgtcaaaggtcctggggtgcactgtgtcctcaggggtgatcagagcccagtgctggacatcatgggagccccagcccctctgcaaccaggtcctgaggccacttaccttcagggacagaggccaagctaacagagcttaaagagtaggaaacgcggccgggcacggtggctcacgcctgcaacctcagcactttgggaagccgaggtgggcagatcacgaagtcaggagttcgagaccagcctggccaatatggtgaaaccctgtctctattgaaaatacaaaattagccaggcgtggtggagaatgcctgtaatctcagctactcgggaggctgaggcaggagaattgcttgaacccaggaggcggaggttgcagtgagccaagtcgtgccactgcactccaacctgggcgacagagcaagacttgtctcaaaaagagtaggaaatgcaaaactcatccagaaggtaggaatgaccagttttgctcatggagacaccaagatgccccaacctccccagtgtcacaggtcctcgggggactgtcctcatgggatgggtaggaccccaaatgcactacatgaagatgtccccggtgttcatcccccactgtttgcaggtttctttagcactgcctacatctgcacataacccataaacagagaaagctgccaagacacaaatcccctggaagaacttattgagagaaggaagaagaaacaaagccaacttgtaaataataatgaggagagaccctcgactgagtcaggtttgaacatatcagctgtaaaagacatttcgaagatgactgaggaacaacaggcacaaagcagattgttaaattgcagtattaagggtgacaatgctaataacattaagtagaaaaatgttactgtaggtacacaagtacactattttgagtgaaatatgaacctttctttcaagtaagagtctgctctgttgcccaggctggagtgcagtggcgcgatcttggctaaaggcattctcccacttccttcataagtagctgggactacaggcccgcaccaccacgcttggctcactttactatttttttgtagaaatggggttttgccatgttgctcaggctggtcttgaactcctagggtcaagcgacccacccacctcggcctcccaaagtgctgggataacaggcatgagccaccgcgttcggccatgaaacttactttcaaaacacttaagcacaaggtttttgaatatggcaagatggtgcaaatgttaacttttcccatttgttggtagattttaatattgccaaaggacgacgtgccaacgatgaatgcatgaaaaaatactttcacttgtgacatgaacaaactcaacgattttctaggtggttgcctgaaggaggtaagtcaagtagagatccttgctggggtcgtggtgggggagataggaaatgggctagctgcttccaggctgagcctcctcggcaggggcatgggccccgctcaagtcaggaaaccgatgttcaagaccttaaaggacctaagccaaaaactaacgttaacaaaaccctctcacgtggcatgaacggtcagaacgactcccgcaggtaagcaaaggcctcgtttgcttccttctatatccattcctacacgactctcaaacccggcaattcacctagaaacttcactctcacttctttggtaactcgataccctatctgtgcccccatggaaccccccaaaaccctctcccgtcccccagtctttgttctaggttgcacaaaaatgccagccatccagaattttaaaagcaagagagaattcctaaggaagcacctgtaggtagcacgaaaatggaaacactcggaaagaactcaatgtcgcctcccagcccgcccacccctctcccccaaccaaatcgacaagatggcggaggcccgcggcgtgcgggcagcacaaggggcgagctccgccgcggggcagacggaggggggtccgccccagcatccccgctcgcgccagctataggagtcgcaaactcccaggcggcccaaacagccaccaccatccccgcagaaaactcccaggctcgccccggagggcgctctctgggtccttgcaaacgccctgaccctttccacgcgactacatggccgctcccgtcgcagcctcgaacccttcaggacacgtgcgtctttccacacagccggaaaaagtaataaacttaagaacctcaccccagcatttctctctccgaagcgggcgcgggttgcagcacgcgccattttatagtgcgcgccgctcgcaaggccggtcctcggcgccagcccgcgctccgcccgaggcgtccaatacacacgcctgtttgggaaaccccatttcatgcttagggaaaggaatactgcctgcttccgctagaatcttcctgaacaagcgaggagacgctgtctctggggctgacaaaaaggggcaaggatatgatggaaacgattgtcttgtcccctgcgtccggcaattctgaagacagcatcaaagatgggccgtgaagagaaaggaccccgagggcggcccgacacgagagagaatccgctgggactatttgcgcggcaggggcttgagctgagtgaggctgcagaggcggggcccaagccgaagggccggacccaaattaagtcccagccactgggctggaggcggggccagtgtggagattgacagggggccgtcctgggaaagcgcccacgtggcgcagaattagaggcggagcctacacggtgacgcaagggccggaaggagggaccctgtgtctggagaagcgggagatgggggcctggacccctgggtctgagggaggaggggctggggtcgtgattcccgtgtttgggagaaaagggggttgggagctgggactcctggggccgagggaggcctttggggctcccactcagttttgacggtctaaggcctgggggcctggattcttggtagggttggagatctcaggagtgtctttccactgataggattatacattctttccacttatatgattattttgaaaattaaaaaatgaaacttctctactccaaactcactttctaggagtttcactgtcaacaatttggtgtggactttatgttttcttttttcagatggagtcttgctctgtcgcccaggctggagtccagtggtgtgatctcagctcacttcatcctccgcttcccgagttcaagcaattctcgtgcctcagcctcccgagtagctgggattacaggtgcctatcaccacgcccagctaatttttttgcatgtttagtagagacagggtttcaccatattggccaggctggtctcgaactcctgacctcaagtgatctgcctgcctcaaacctcccaaagcactgggattacaggtgtgagccaccacgcctggcctggtatggactttatatatatatacacacacacacacacacacacacacacacatattatggataaagatacttttttccactctaatctgtcccataagttgtttccccacatgagtacgtacagaattatctcattcactgaacaatggcaacgggctcctttgtgtgaattgaacacgctttgtttagcgggtccctggtcatttgggttgttttcttctttctagtgaggagattcctttcatgaaccttgtggtctggagtaaaagaagagacctacattcctctcttaaggcaatgagagacgtttatgtcactggctgctgcctcactttagcataaaagcaaagtcctcgctgtgacccacacagcccttagtgatctggcccctgtcccctctcagcctgcatctctttcctctcctttggcctccctggtgctcctggaacctgccaaggacgtttctacttcagggactttgcatgtactgtcctctctgcctggaactcttttcccccatctacatggctttctgcctcccttggtcctatctctgctcagatgtcatcctggaatggagtctcctgacctccttgcctccactttatatgactgtgaggctctcttgttccgaatcccatctcacctaccctcctatatttttcgtcataacatttacctctaacctattgtctgctttattttattttattttttgagacagcatctcgctctgtcacccaggctggaatgcagtggcatagtcatggctcactgcagccttgacttctcaggctcaatcaatccacctgcctcagccttcatgtagctaagactacaagaggacaccaccacgcccagataatttctgtattttttgtagagacaaggtttcgccttgttacctaggctggtcttgaactcctgggctcaagccatctacccacctcagcctcacaaagtgctgggattacaggtgtgagccaccatgcccggctctaactacttgtttatggacatattttgctgccttgctgaatgtcaattccataaagataaggattcgtgtctagtttgatcagtgctatacatccagtgtctagcatatggttgcagctccatctgtgtttaaagatgaaatttgcagcgaggagtggtggtttaaccctataatcccagcactttgggaggctgaggcaggagactgacttgagcccagaagtttgagaccagactgagcaacatagaccccatctctagaaaaaaaatttaaagttagccaggcatggtgtcacatgcctgtggagccagctactcaggaggctgaggtgggaggattgcttgagcacaggaggttgaggctgcaatgagctgttgcaccactgtactccagcctgcgtgacagagagagaccctatctcaaaattaagtaagtaaatgaataaatttgggagccttttgcaggagacaagggggaggattattgcaatagtacagaaagagcacacactatggaccaggcattgtgctaaatcctatctagattaaagtactattattatcctcattttacagatgggttctacaccttgcctgtggtcacagagctactagtgacagagcctggactcaaaaccaggcagcttagccactgtatgagagggagatagatggcagccccaggccaaggccctgtaggacaatgatatgactttgtacttggctttcaactctgccctgtccaggaaatggctctctgttagccccaaaccatcttcaaagggccattacacagccttgtgctgggggactctggggaaaagaaagacggggtggtggtaagagctactgttaagcgtaggaggtgaagtgtgggtgcagggggaatttgcttccggaagggtaaattattaaggactgcaaaaataaaggatgaagctaaaagggcttggggagaatgagatattcggcaaacactgattaagcactatctgtatgccagggaccattggctcggcctctttgttgaccttgtgccttgagtcccttacttatgagtcccttcccttccctatccctctaccccagagggcccaaagatggccccagagaggggtttcagttccaccaatgcttccaaggctcagagctaaattaaagaatattctgggcagaaaatacagattattttaaaagaaagattattaatctggattgaggcgggtcagaagagactgaaaaaagatgagtcttcatggggttaggggccagagagcagggttgtcagcgtggggttaggggccagagagcagggttgtcagacacttggcagagagctgttggagcaggccagcggtgagatcattcgcgtgtcttaggtccggatgggctggagcgccaggatagaccagaagtacatgtaattcagataggacaagaagccttgtggagaggaagagggcacaggagatgagacacagagttcacccacccaatcccaatcacagtcctgtccccaggcccaattgcatgccctgctctgcatcaaaccccatccccaaacctattcttaaacccatcaccaattccattccataccctaacctattcccaaacccatctccaaaccgaaactcaccttcatcccctacactgtccctaacccatacgcaaactccaacccagtcccatccccattatccagccccatgtgcatccccaatcccgcctcccacttcagtcacttcctatctagccctgtccacaaccccaccccgtcccaaatgctatcccaaatgctattcctgtctgcatccctgaacccatacccaaagccaacctcatcctctcccataccagtcatcaggaagaggaagacactggcccaggtcaggtagaagctgagtgccagctggtaggtcatgccttcctgcaggtacctgtgggcctgcagcaggtagaacaggatacccagtacgatgctggttcctgcatgagcacaggtgttaggaggctgagaatcagatatgtaaggactccttcccatagtcatgtggctgcctggctctggctcattatttccccactttctttaacctcccagaccctgtacctttgctcctaagcatgaagatgggcttctgaccaagtcctgctagaggacactgaaagggcaagccttgggctttaaccaggcaatggtaagtctgtaaccacaggttttgaggccaacagcagggatcttccctgcctccacctctggacttagggcagccatgccatatctctgagcctcagtttcctcatctgtagagtgggcacaatcataggacccatctccttgggccgtcatgaggagttactgaggttggcacatttcctgatacacagcaagcccttagggattgggattgattattttcattctattgggtctttaatttagggcttcagaagcaatagacaaggaacttggtcattctggatatattggaatgacatgaattaaagataatttgtgaataggaaaagactttttcccctggacagtggagtactgggtagttttgtctgatgttattgaaaataatatagaaggtattttttgtttaattaaaaggaggaatagacagaaatggttttcttatagaaaaatgttctgttatagatggtttaaaacgaaggtgttttttatagtttttagaaaactcatgctttttttgcgcaatattctataccttgtactttatatttaaacaattaggaagagctactagataaactgcataaatgcttttttttttttttttttttgagacagagtctcaatctgttgcccaggctggagtgcagtggcgtgatcttggctcaccacaacctccgcctcccaggttcaagcaattctcctgcctcagtctcccaagtagctgggactacaagcgtgcgtcaccacgcctggctaatttttgtatttttagtagagatggggtttcactatgttggccaggctggtctcgaactcctgacctcatgacccacccaccttggcctcccaaagtgctggtgtgagccactgcactcggccaagtactgacatttctaattcaatcctcagtacgtttccatgtggtagcaaattttgtcctgatcctacagatgagaaaactgtggcttggagagatgaagtagcttgaacaaaatcacagagctgctgctgctgatgggacaggatttgggatgaggttagaatgggaaataggattgggtattgggtagaggttgaagtttgagtgttagaggacgaggttgagagtggtgtcaggaataggttgcagttgggatgggttgtggttgaaggtgggtcgtagttggggtgggttgtggttgggggtgggttatggttaggggtaaggatgggttgaaatggggtagtttgtggttgaggatgggttggaacagggatggtctggttgggggtgggttgggatggggatgggttgtggttggggatgaggatggggatgggttatggttggaagtggattgttgtggggataggttatggttgggggtgggttgtggatgggatggttgtggtttgggttggttgtggttggagtgaattgtggtggggaagggttgtggtggggatgggtggtggttgggggtaagttgtgatgggagtgggttgtggatgaggataggtcatggttggggatgaaaatggattggatatgggtaagaggatggagtggggaatggactagattgagtttggcattgaagttcacaggtgatagaattgggttgcatttgaaacatatgttgaggatggttgggatgctgcaaagttggttgttgagatgtttgaagaggttgcggatggtaatgaggatggtttggtgattggaaagaatgtagaattgggatggagtaggggcatgagggaaagggatgtgaatgagtttgagatttgttggtgatggagatgggacttgaagtggaggctggtattggggctggagatagggttgggctggtggttgatgttttttatgggaatgggttagagatttggaaggagatggggttgggattgcggatgatggtcaggatggggatgggattggagtgtggtggggatgggattgggtttcatgattggcactggaggaggtactcctcgccttggttcctgagggaagtgccatgcctgtcaggatgctggtgatgaaggtgaagaaatccagcatggacgggttggagccggtaaagaggatggtgcttattagggctatgcaaaggcagaagctggtgatgctggagaagaggaggaaggcccaggaaaggtccagcaagtctggggaaggaagataatcaggaacaccatgattggcccaggctctgagtatggggacaagggtcaccagttggtgtgggagtattctcaaagctcctcccttgcaaattatttattctcattttaggaaaatttaaattgggctccagagaagagacattgagactgatacttccagcactgaggatctacctctaggttggtgagggcagcttcttgggcagtgagaagtggggtgggcagtgaggagcattcccagaagtgaggaccactctagggctgtgaggacaatcctagggcagtgagaaccctctgaggcagtgaggaccgtcccagtcattgaggaccatccgagagagtgaggactatcccagggagtgacgaccatcccaggcagtgaggaccatctcaggcagggaggaccatcccaggcagggaggatcatcccaggcagtgaggaccatctcaggcagggaagaccatcccaggcagtgaggaccatcccaggcagtgaggaccatctcaggcagggaggaccatctcaggcagggaggaccatcccagggagtgaggaccatcccagtcagtgaggaccatcccagggagtgaggaccatcccaggcagtgaggaccatcccagggagtgacgaccatcccaggcagtgaggaccatctcaggcagggaggaccatcccaggcagggaggaccatctcaggcagggaggaccatctcaggcagggaggatcatctcaggcagggaggatcatcccaggcagggaggatcatctcaggcagggaggaccatcccaggcagggaggatcatctcaggcagggaggaccatcccaggcagggaggaccatcccaggcagggaggaccatctcaggcagggagggccgtcccaggcagggagggccgtcccaggcagtgaggaccatctcaggcagggaggaccatcccaggcagggaggaccatcccagggagtgaggaccatcccaggcagggaggaccatcccatggaagtaagggccatctcaggcaatgaggaccatcccagggtggtgaggataattctggggcagtgaggattattccagggcagtgaggaccatcctggaccagtgagtactatcccagggcagtgagaatcattcgagagcagtgaggagtatcccagggcagtgaggactatcccggagcagtgaggaccattctagagctgtgaggactatcccagggcagtgaggattatcctggggcagtagggactatcctatgacaatgaggaccatcccagtgctgtgaggaccatcctggggcagtaaggaccatctcagtcagtgaggatcatttcagtcagtgaggatcatcctgtggctgggaggaccaccctggggccgtgagactcataaaatacctgtgaagatcattgcaggaaaggaagaaaccattctgtgacaggtggaggggtccctgggataaagtggagcgatgggtcccaggagtggtgagggcagggcaggccttccaagcatcctggctgtgctcatgcaggcaggagatgtcacagcactgcttctcctcccccagaagtctagctcagaacttggcctccggcctgggcactgcctcatacctgccagaattgatctcaatggagctgcacaatgagaggttttgcatgttgtctagaggactttggttgagttcagagctgagcacacttgccttcagactctcctgggactcccaggtaactgattcaatgcttttgatactgggctcggggccgtaggtaagtgatgggagcacattgacaatggcccaggcttggaagttgggggttggaacacttaaatgggcagtctcggttgttgacaggtagttttggtcatgatctttgttgctggggataattgatgattagtcagggggtgagagccttggatactgaagcagcgagtttggaaaattggtgaagcacctcgcatactgaaatcgtggctgtaggtaatggctggtgtttctgggatactgatctgttgactgctgatagctggtgtagggtcttggatactgacctggtgattgtgaataattggcaaggggtcttggatactgaccaggcgattgctgctggctggtggaggctgttggatactgaccccgtgactgttcctggctggtggagggtcttggatactgacccgggaattgtaggtaattggcaccaccgtgcctggctaatttttttgtaattttagcacagatggggtttcaccatgttggtcaggcgggtctcgaactcttaacctcaggtgatccacctgcctcagcctcccaaagttctgggattacaggcataagccactgcgcctggcccttattattattttttaaggtatagaaatctagaatttttttttttttttctgagacaaagtctggctctatcacccaggctggagtgcagtggcatgagatctcggctcactgcaacctccgcctcccaggttcaagccatcctctcacctctgcctcccacgtagttgggactacaggggagtgctactattcctagctataattttgtattttttggtagaggtagagttttgccatgtttcccaggctggtctcgaacttgtaagctcaagcaatctgcccaccccagcctcccaaagagctgggattacaggcatgagccactgtgcccagccttagaatttttaggtagtttaatttcttcacctttgtctctgtgactttattaattgcttcttggcttcgggaggttctccctccagatttttgatgaacattcagttctgtttttttaaattctcattacttatttttaggttttgattgtgattttggagttggtatgcagggaacattgaattctgtgctccctgctgtcctaaggaagggacttgaattagtcaggagtttttgggtcacaagtgacacaaactctttttttttaaattttttttattttttacttttttaaatttgagatggagtttcactctttcacccaggctggagtgcagtggcgtgatcttggttcactgcaaccttcaccccccgggtttgagcgattctcctgcctcagcctccggagtagctgggattacaggcgcccgctgccatgcccggctaacttttatctttttagtagagacggagtttcaccatgttggccaggctggtctcaaactcctgacctcaggtgatccacctgcctcggcctcccaaagtgctgggattacaggtgtgagccatcgtgcccagccacaagtgacacaaactctaacttgaactagcttgagtgaactagttgtattagcttgagtgaactaacttgaactagctaggggatcctttatgggatcacctgagtgaaaaatggtaatggtaggaatgccttcaggcatgggtggatccaggggcccaagtgatagtatcagatattactgttttttggctatgggattggcttcattctcaaggctctgtgtagtggcaagtcagaatccagtaaggaaaataaatcattccagattcttcagaaggaagtaaatacagggaatttgttcgtgagtaacagaggagctgagaagccaataggaaatagtgaggcaaaccaggagttaggaactacaggatgctgctacttggccagaaggacaaagggaggaggtggtattactacagtccagaaactgcagccctctggaacgcataggttcatggttggattgctcagaagtggctagaatcagagaatagatacaactactacggaagacccaccacatgcagagatagagaggctaataaataccctggcttgccctctcctcccagaaccagtcttctgccagtgcctcccattagtcaaacacagtgataagatggtgagcaaaggaggctgggaaatgtggtccttgcagtgcagaacaggacagggcgggaaatggatctgagagcagacagacaaaaaactggcagagttgttagcaacttggcagagttggtaataactgccgagtccggtagaaaaaagttatcaacagttcttgcaagaatcctgtgtggcttggggcacatgagcaccccgagccaattatatggccagtggagtacagttggctgattggcttaagactggggctgagaatggggaatgggcaggaggtgaaatgcatggtggggaggtaagctgcaaatatccactcattctgaccaaatcacagagtgggctgctctctgggatgacgagagccagggacttcagtgtcagctcaatgctctttcgcttgtctgttttccttcttagttttactctccccatgaagctaggtccaaggcttaggcagcttcaggcttgtaatccttgaggagagactgcttttccttgacagcttcctaataaaaagtcttggggcagagcttgattggttgggctttggtcatgtgtccatctttgggccaattgcagggtctgcagctggggtactgtgattggctcagccagaatcacatgattacctctgtggcccagaggccagcatatgccaggagaatccctcatccagggttatgtgagttgggtggagggtgtccccaagagatgtcaggctgctgttctgggcagaccaaattcaccattcaaggtcttggtttctggcttggtgccttctccctgacctctgcttcttgactcttcaatgagcagaaagaactaagggaactggctgggcatggtggctcacacgtgtaatcccagcactttgagaggccaaggagggaggattgcttgagctcagtaatctgagaccagcctgggtaacagtgagaccccatctctatgaacaaaacaaaacaaaaacaaaaaaccaaggggtctgatatttcccccacttcccagagtgctgttgctcttctgtatatatgatgatcctttatctttcttgttgggtattagagatgtgcagtttgccagaaacaaagcagatgaggtcttggcctatttggctaaaacaattttgcactgttgaaaagtagacaaagtagaaaaagggctaaaaggaggagatgtagcatctcggaaacaggtaaacctctcttctgctggaagtctaagttggataaatatccactgtaaactggaactaagcttttgggcacattggttttagagtatttgacttgaaagtttttcttgtgtgcaaatctgtatgtgttttgtgggggctctcaggtgtgaacaagagatgacattaggatgtctgaggagattctcggcatgtgaatggggccactaggggaccttggggggtgactagcagagactagagcagaagtagggtgactttggagaggactggggtgaccgtggtgtcttggataactttgagggtgctgttgagggtgtctgggagtgaaactgaggatactaacatgagttgttatgagacaccttttaggagttcaagtagggtgaccaggggtgtctgtgggggtggttctagaaatgatcgaggctgggctcagtggctcacgcttgtaatcccagcactttgggaagccgatcacctgaggtcaggagtttgagaccagcctggccaacatggtgaaaccatgtctctactaaaaatacaaaaattaggctggcgtggcagcagctgcgtgtagtatcagctaatcgggaggctgaggcaggagaattgcttgagcccaaaggcagaggttggagtgagccgagatcacaccactgcactccagcctgggcaacagagcaagactccatcttaaaaaaaaaaaaaaaaaaagaagaagaaagaaagaaatgattgaggtgattctgtggggtaaccttgaggatgagtgggatgacctttggggggtcctctgtggggtgaccttggggggtgtgtgggattatgagagtgtctgagaattgagttttaggttaagtaggggtgatttgggacaactctaagggtgtgactgggggatgactttaggggtccctgggggtgaccttgtgagtgagattggagtttctttggggtttctaggaggtgactttggggaggtgagtaggggtgattttgaggatgtgccagactttggggttgtctgttgggctgcttgtgggtatcagcagagatgactttggagggtgaccaagaggggtatctggggttgactctggggcccctgtccccctctccccagttctcatccatatgagcaagggcttcatgttactggccgtggccctgtgctgagtcctcctcccgcccatggccctctcctcctggccagtggtcctccgcctgaacatggccgactttgtcttcagtttcctctgcctcggcattggtaggtgttggcttggggggcgggggccctccctaaccccagccctgctctctggctttctggaggtgtatctagacttccgtgctgctcccctcggggcctctgtcttagcatgtctctggggagctctgactcagttctactctatctgtgggatgtctctctctcccccactctctgtttccctttctttttttgtcccctctctccaggtatctttctgtctgttgtgagggcgtgtgtgtgtgtgtgtgtgtgtgtgtgtgtgtgtctgcttgtcacggagggtgggagaggatgtctcagtccctcttttcttactgggggtcatagggctcactgtccagccttctgtctctggccccaccccattgcagggctcctgatttctcttcagcctgacgctcttttcagttaacggcaaggcggtgcacccaagtccggtggtgtcctacctggtgacctcctacctgtgctgggacgccagcgacttgatgctgcactccggtgagggcggggcctcgggaggagggcggggcctcgggaagcgggtggggcctagggtgggactcggagtacagcggcccacctagccatctcccaggagccgtgtcctacctaagcccagtgggcatgtgaagcagagggcagcccttgaatgcgcggcggctgagctaccgcgggtgggccgtgcagcagggcgcagcgaggcggacatccaaacagcggaactcagacgctgactccgagcgcaccccgggccttcccatttcatacaccctcgaggatgagacccaagcacctccaaggaatagcacccgaggtcttcaggacaccgaccggtagccatggccagatgcccggccaaccccttcagcgtggccacgccctggatattcgacctcccctgaggccccaccccctgatatcaggccacgccctccgaggggaccggtggcaaactccagccctcgctctagggcccgccctttgcggctttgtccctgcccactgggtcctcacagtacctccaccccagaggcccagcatcccctcccgttctgcagacacttgtccagcgtcccgctgagctcggcagtgtggctagtttgtgtggccctgcccctggtgcccagccagggtggtctgcatggaacttctttcccggagttccggcctcagctccgatgtccacccttgtccccaggtggacacagcaccgcccagcatttggtgcaactccacccttctgcagaacgggcccctccctgggaaggcatggcttgcaataacatccctctgtaccttttctggcttccccgccacaataaaacctctcagcctcagaccttccattgccccccacctccccaccagggcagggtccatcctagtgtgagtgaactgttctggcgtccctgacttgccctttgggatctgagcctttccctgcctgtttgtctgcacctgtcacagccccttcctttccccacctgctggtgacctcagacttccaggcatgagattgacacagctggggtggccccagcctcagccgagtgggtccaggtgcaccacatctggaaagataggtgatggcagaacgtgacacacattggatgcacatttgattttactgggggtaggggacagggctgggcgttcaggagttctccgctatggtgtcctcgatccacttcacataagacagcactctgacggcgacagaaggcttattgggggtgccacaagggacgtagccccatgatgtgacaccttggagcacaccatcacacatcagcgggccccctgaatcaccctgggagcacaaggtgggaggggagagtgagaaaggtctacggggcccaagttctgcctggggagccccagctcgcagacagggcctccagtgcccactcccagaggaaggtgggcagggattcccacagaggggacagggtctccagtcctggccaagggggaagggacctcagggtccagctcctgcacatggggcagggtccaggtggacagtgcctgcagacaggttagggggaggaggggcaggaccatctgcaggacgctgcccctgcgggcacatcgcagaggccacctctccaggactactctctgactcgacggtaacaacacattaccacgaggaacggtgaactctggtgtggggggtgagatgcagttgtccctggatgggcgggggaaggagggggagctggggcactgatggggcgagtggctacagctagctgggaagcagtgaagcagatgcctggttagctctcagaagccagttcagaggctgagtcccctccctcagcccttccagaccctgggggcagggctgcctcaccacacaggtgtctttgccaccttccaggtgtccgacacacagcatgaagtctgtcaccttctggacgtgggcttttttgcactcatcattaggcaggattttgaggtccacacactggagatcatctggaaatgagactacgaacccgggagaaaaagggctgcagcccgacctcacctgcttccctggccctttctcccttggacgcaggagtccccatccccgccttgggctacacagtctgcccccacatacaattctctggttcgatgctgccccagccggaagccaaacaggtgctccccacttcgggttcctcggtgggcaactccacgaccttcacagcatctgtgatggtatcagcaggctctgtcaggcggagcagcatgaggtcgtggctgtagtcctcgtctgcttggcgggtgtggttctccaggaggctcatgttgaagccagggtgtgggaagctctcactgacatgaacaaactgggctgtgttttcgtcgtcaaacaagttgtggcgacccagccagagctggtaattgctggggaaagatgggaatggagggatgagaagacgggaaggggaaaaggggatggggcaggggagcatgggggagggtccccaaagagagaaagggaaagagaaaaatgtgggtgggcggagacagaggaagaaagatatagttatggagaaatacagacagcgaatgggaagatgaaagattttgagagtgcaaaaggcaaatgaagagacagagcaaaaaagagctcaaaaggacagaggggtgaaaaaggcggaggggagggcagtgagaaacagggtgagcaaaaaagaggcagatgagaaggataaaagacagggacagcgagaaacaggcccagggaagagggaggaagagggaacagaacacggaagggagcgagaagcagacaaatgaaaaaggacgcgggacgtcagagtgagaactagaaacagaggcagagaggaagcaggagtgaccgagtgtgggagagaaaagggagggaggccctgggggagggtgggggcaggtggggagggtgggggcaggtagggaggaggggaggcctgagagcggctcagctgcagctggggctgtggtgcgggctccccaggggcaggtggcctggcctgaagtccaaggtcgaggcccccttcccttcccagcaccctcccgcgcgtttctcgccccgcctcctccttcctcctccctcagttgccccacccagctcccgctgaaaccagcccttccctgtgtctctccagagtggagggatatcctgtggggcggggagctggacagagggagaggcgccccctcccaggcacacaagttggggataaagcccttcctttactctggggcctcccttaggtccatctgggtgtgtgtttagtagggatgagggagcggtgaggtagagacccagagagagagagatgggtagagagatggagggtgagacacagtgacagagatgccgcagagagactcagagacagacagagacaggggagatgcagagacaaggagacagaggagagagaggaagacagagaccagaacacagtcacacagagacacaagcagaaccagatcccaagagacccaggcagccttggagaggggtgtccagcccagctctgccctgccaggcgacctgcgccagagccttcctctctgcctcagccccccagtcttgcctgaggttatccaaggggaatgccactggcctgtcaatcctgtggcagcatagatgccctcctcccagaccccaggcccctactcactcgctgatgcaatgagcagctgtgagcacccactggcggtgcaccaggatgcccccacactggaaagtgctgaaatggtacagagccgcctgccagggctgggaatgctgctcacactcccagcctcccacaatccgggactgaatcgggggcgcagcacctgcagaggcggtgctgggtcaggaagggcagggttggcaggagaggccagggacaaggctaggagagggagctgggctgtgggtctgaagggacattgcgggtagaggaccagggctggaggttggggacatgggcaaggggtgttgggaaggggtgggactctggactgttccctgggcttttggagtggtggctggacctggtggggagattttgtgctctgacagtagagcagcctccagggatcagggtaggagacaggagacagtgtctggagcagacactgcatctgggcgtcaggtcatttggggtctggggctgggggatgggaggtggtgggttaggggagtggaaagggattctggaaaccagggatcaaggcgccaagggtgggacaggatcagaggctcactgaggaagaatctggagggctaaggggctcctaggctagggaaacaggacctgggttgggcttttgaggttcaggaaaggatgcagctttagggaaccaggtctgagaggtaaagaagagcatctggactgaagagtttgggggtgacttggggtccctacattggggttggaaggggccagcttggctgggacagttagatttcagggcttcctggttaaagggtaaaagaaagggctatggttaaggctagaggtgggcttccgagaggttttggggtccttcctgtgaaccaggaatggcaatctgaggggaggttggggccctgagaacacagttgcggtcaggactgggacggggctcaggaggagggaggcgtgagtggcagtccttctcggacagggtgaaggatgggatcttcgtttctcatggggatggggttcatggtctgagggtactggaaggatatggggtcctcttggaggcaatcctaggaagaggattggagaagtggtgagaacaggcgccaagcagctgtgggaatgcaatgcaggacccacttgacgtgaggttgtagaatcacatactgacttgggggaggccagggcagaagcgctggctgagaaggcattcaggatccttggggtggggttccagaaaaccagagctgtgtaggaacaattcaggcagagaagggctggggcctggggcgggatggaacttccccaaggaaaggagcatgtggtgggagggtgtggtgtttttcctgggagagctgggggtgctgggtgggaagggacatttgcagacccccccccataccagatgggggatcccacatgccagtttgggaagcagggttttctggtgaaatttgggggaccctggaaggactggggagaccagatgtcagggtctggaggacacagttgagagcggacagctggatggaaaaagtcactggagtgtggtgggatttgtagactcaggagccaaataggtggccgcagggaactagggggcaggaggggatgatcagagtcctgtggggtgggggaagcccatgggagggttggggtcctccagagagagacagagatggcccagaatctgcccctttggtaaagcggtgggacagggcgttggctagggaagaggagaaagtactgaggcttcctgggaggagcaggaatctggtgtgggagtgagcactatgacaacatggaggagcgggggtggaagtttagggtggggccgcgcaagatagataagagccggggcaccccggactaggatagactgtgggccagagggatgagggtggggtgttggaggggaaggtcttatcggggggggatgtgaggccagcaagagaatcagggcccgttccccctcccacatccccccactgtctcaccagtcccccccagggacagggcgaggcacagaaccaggaaccacatggtgacagaggtgtccaggggccagcaggtggaggaactggggaacctccctggggaggcttttaaaagcccttatcccctcagagccccacccctgccctgctggcacccagatgttggccaaggcccttcccctgttgcctgggggctggacaattgccccccccccctccgatccccagagctgtagacggggagggagaaccagcacctgttctgcaggccctggatcacgctggacgcattcctggggttgaagccaggtggggcagggcctgtggctctggggctttgctctggggagcagccagtgaggcaaggggggactgaggggaagcagaaacaggaagacggaggaatcagtgacccctggtacaaagccccatatacctcagtctcaattaaggccctgcacccccagacctggtgccctcaaacaccagcagttagggctctgattccctgcaccactcggagccaagatactagcatctcagctgccagttccccctgaaatataagccttggccttcagaatgccctggttcttgcactcccagacccaggacctaggtccccaaagctactgttcctttcataataaaattttggggtacacatcaccacattcctagtgcctccagatccaggaatgtgaagtttcaggggtctcccagggtaagttctttagcattacaaaatccagtgtccctcccaaacaatgctggggtctcaatgagcctcccacttcttgctcccagttatgggtgctcaacgtcctgtcctccaaagtcccagagatctggacaaccttccctcccaggtcaagatcaggctaaccacagattccaatgacccttcccccccaccaccagtacaatatttaggtctcacgagccaggttcatgtacttcaacattcagcgaccttgaacatcacattttgtggtctctgaagataattaggaactagattcctgcagcctcaatggtaaacccataggcttccaacaggttgtcttggctttttggtaaaatcaaagcagctcagagttccagcctctgctgtatatcagggacctggctaaggaaaggacagtatttgcctttttgccatggctaccaggaagcccagaactaaatctttttttttttttttttttttctgagatggagtcttgctctgtcaccaggctggagtgcagtggcgcgatctcggctcactgcaactcctgcctcctaagttcaagcgatcctcccacatcaccctcccaagtagctaggattacagtcgtgtgccaccacgcccggctaaatttttttagtatttttagtagagatggggtttcaccatgttggccaggctggtcttgcactcctgacctcaagtgagccgcccgccttggcctcccaaagtgctgggattacaggtgtgagccaccatgcccggcccagaactaaaccttaaagaaaaagccattcttggtaatctagtgtctgttaggtcctttaactgggatccagagatagagggtatttactcagtgccagacacgattttaatcagttcagacgaatcatctcatttaatcctcacaacagccctttgaagtcagcaataagatggtctcattttacagataaggaaaccaaggcgaagtgagattgggcctcttgttcaagatcacacgggtggtcatgtgtgttgaatgaatggagccctgcttcaagccgcttctcctcacctagggatcggggtggtgggtgaaaaggaacagtgtacagtgtctcggggtttctctttgaccccagaaaaaagtcacagaaattcctacagagcaacttggatcagcgctttgttatcttggcattaaacaggtgaccttgagcgccagctttgtcctcaggtgggacaagtccttggctaacatctgggccttggacagggtcttgggggatggctccgttctgttccatgtcaggcggggctgctggccagctgtgggggcttctgctcagtcaggggcacaggagataggctagaatagtcagttcctcttcatggtttccctgatccactccaagtagtggcagactttggtatagacaccaggcttggtggtgttgtcacaagggacgtcaccccaggacacaatgccctgcaggatgcccccacagaccaggggtcccccagagtcaccctgtggggaaaagagggggtctcaggttgagtgaaacctcctggattcatcctcatcctaatcaccatttgcaatctcaccccaaacccaatccatccccatcccagggaaccccaacccaactcaactcaatacagcccagtttatcccaaacagagccaacccaaccccaaccccaaccccaattcaacacagctcaatacaactcacccaacctatatccaatctcacccccatgcaactccagtgcaactgtactaagttaaatccaactcagcccacatcctcaccattcaaaatcaaatcaaacccatgcccatctcaaaatccaatctcaatcttcatgtcttctgcattccaaacaaaatctacctcatcccaattcaaccctgacgtatttcccacccagaatcaaaccaaaccattcccattctcaaccccaacccatgccatctcaaactaactatcacattatccacctcaaacaacgcaatccccacctataaccccaactccaacctcacccctattctaacttctcttcctactccatctccaagcctaaccctagcatcttctctggcccaaagcaaagaaaatccaaccccatccggactcccacacctgtccccatccctcttcttccgcctgatggcccctctaggctctgacctcacaggattctgcgcctctgccctccgcgcctgcacacaccatggtgtttgtcaggcgccctgggtagctcttgtcacaagatgtgtccgagataatgctgatgttggcacaatgcaacgtatctgggagactcactggggaagacagtggacttggagcagatccataaattccggcccttgtcccctccgcccaagagccctggagcataggattccttgaggcctcgcatccagctccatcctttcacgcaccttgtgaccgggggctcccagcggtcccaggctcgttgtgggacaccaggccccagccagacaccacacaggcctcccccgggtgggggcaacgcgtgggtagcaccgcggggcgcacctgggggttcaggcgtgcgggctggactaggcgcagcaacatgatgtcgttgcggtggctgcgcgcttcgtagcgcgggtgtggaatgacccgagacgtggtccgtagttgctctgggccatcgcgcttgcgcaggttgtgctctcccaggcgcactctcatgaagctgtgcgggcgagtggttttcccgccagtggagtgcgggccagtggttacccgcaagtagaggacagaaagatcaaagagtgggcaacccgaggtctcccgaccctttagaaatctcgacatcccattaccttttcccaagaccctgaagccaatggttccagcccctgctcctcaaggaccaacgagtctgaagtcaggcacactcctagaactcgatcccctccaactactcccagccccctcctggtctgtccccgaatccaggattctcacatccctagaactgaggctcaaaagctggaactagtcttctccttcctccttcagagatcgaaggctttgaaacacacactccttcctaacccaggggcttgacatccggcctcctcgtctttcagaacccaggagttctggcgtctgcctccgtcttcccccaaatctaggagctcttccccccgaaccaggctccctcaggaccctgagcccctgccttcataccggctttggcagtgggccgcagacagcacccagtgtggggagatgagggaagcgccacagttaaagcgtccacgctcgtagagagccacttgccatggctgggagtggggtgcacactcgtcaccttccagcaacttgtcaccatcctgggctgctaagagaaggggtagaggatgcctgaggacagggacgtttacattgcctcctacaccttccttgcaccctgccctaactactatatgcctatgcctttcccctaacttctcaagacaccctgccctgtttttgtttgttgttgttgttgtttttgagacggagtctcactcttttgcccaggctggagtgcagtggcatgatctcagctcactgcaacttccgcctcctgggttcaagtgatcctcctgcctcagcctcccgagtagctgaggtgcccgccaccacacctggctaatttttgtatttttagtagagacgaggtctcaccatgttagccagggtagtctcaaacttctgacttcaaatgctctgcccgcctcagcctcccaaagtgctgggattacaggtgtgagccaccatgctccgcctgccctgttgtttatttacaaccgctgcctgttttctccagaactctagcccccaccccatttgctataagactctgggagagagaggaaggggaacagaccagagggcaagaagtcctctgtggttgggggtggagacaggggcactggatacaggttcagacaggtggtcacttgaaaccagtcattcacggtcaccaaattgtcacagacgtcaaacgcatgtggccactcagtatgtgtgacccagccttggccccagagtctggacatgtcagccaaattcagtgtgcagtatgagtcccagatgtggctatacaaggtcatggacatgcatacatgcacatccagcttccacacttaggtacagctatggacaggactggaagctgaaattcacttgcatgcacatgggttgcagcttcaagaatcacagcacaggctgggcacggtggctcatgcctgtaatcccagcactttgggaggccgaggcgggtggatcacctgaggtcaggagttcgagaccagcctggccaatatggggaaaccctgtctctaacaaaaatacaaaaaattagctgggcatggtggcgggtgcctgtaatcccagctactctggaggctgaggcaggaaaatcgcttgaacccgggaggcggagattgcagtgagcggaggttgctccattgcactccagcctgggtgacaagagtgaaactccatctcaaaaaaaaaaaaaaaaaaaaaaaaagaatcacagcacagatgttcatatgtgtatatgaatatggatggttaagacatgaatacatacacacacacacatgcacacacaaacacacacacagaattggatattgttcagacctaaattcaacatctctagtgtgagtcttggcatccagtgtcacagacacttgcatacagggtctggacaaagatgggtccttaagcctgggttcgaatgtactagctgtgaaactttgagtaagttattcgacctgtctgtgcctctgtttcctcatctgtaaaatgaagattgttgtaaggatgaggtaggaatgtgtatgtgtgtgtgtgcatgtgtgtatgtatggtgagtgatacctagccctggtagctacttaataatattagttgttttttgcaaatgacacctggatttagtcacagggacatacgtgtgaaagttcaggtccatcctggagatggccaacataagtcagacatctgcacagaattacctataataaatagtcaaggttggccaggtgtggtggctcacgcctgtaatcccagcactttgggaggccaaggccgaggtgggtggatcacctgaggtcaggagtttgagaccagcctggccaacatcgtgaaatcccgtctctactaaaaaataaataaataaataaataaaaatacaaaaatcagctgggcgtggtggtgcgtgcctgtaattctagctactcgggaggcagagacagaattgcttgaacctgggaggcggaggttgcagtgagctgaggttgcaccactgaactccagcttgggcggcagagcgagactccgtctcaaaaaaaaccaaacaaacaaaaaaaagtcaaggttaaaaccgtgattcacccacaagacattttgtagagttagagctgcagacaccaacccagaaggccaacactcagatgtggacttgctgtctggggcagcacccagacacggggctgggcattcaaggtcaaagacatgcagctgaagccagaggcagccagggcaggacatatttatccatctctagatcagcccccaagccagatctgtggagtcactgattgggtttcacatatggggatctggctcatgcatgtggagaggatgtgaacatacagggccttgtatacccactgcacacgtgcatgtacacacacacacacacacacacacacagaatggcattatgcttaaggacatgattagagacattcaaggtcacaggaccaggacccctctccactgggcaatgtggatgcatcccctgaaggttgaagccatgcacactcccacccacacaggggcaggatttgcacagccagaccaaatgcccacactctccccatcacagtcaggaactgggccaaaggcccccgtgagaccaggggaatgcggatgtggtggacaaggggcttaacaaaggaagggtgaggtcgtcctccgaagggcggagggtacgggctgaacagctgggcaccgaggctgcacctggccagtccaagccagaggaaggtggaggccccagctgggcgcagcaggcaggcgcgaggcaggtaggtgagtgcacagagagagccggaggggaggctggaggcgtgggggtctcaggggcccccaggagtgagggtcatttgtggcagaacgttaatgaaagtccaccccccaatttctccagaagagaggcatcaggttacaattaatttcttggtgtgtggcagctgagttcaatctggagtttgcctgacacccaaggtgaccttgatgttgtggccgtccctctgagccacagccccttcccttgtcaaatgaggtcggtggtgcccaccacacatagacgttgtatgtaagctctaagcaccgtgcctggcttgcacacctgaaggggcactacctgggccaggcttatgcttctgcctcacacacaaccacatttaatcccctcaaagaccctgtaagagacagggagtggcaggtgtgggactcaagctggagtctgtctgtgctgttggcctctcagcacttgtctaatgcttgctatgtatattacctctgttatgctattgagacctcactgttattgtctcaagtgggtgctgtcttatagagaaggcattcgaagcccagagaggtgaagcagttccctcaaggacacacagcaaggaagcggttgccccaggactcagctcaggtttgtgtaaccccaggaccgtgttccttgtcgtgggcagcgagaggccccaggcaacatagcgactccagagcagcagcaccagcacctgacggtaagggcttagggacattggcacaggtggagggtgaaggaaggatctttagtggtctctgggtgaggtaggggctggcagatcactgggcccagacatgcttgggaagggggcacctgctcccacagacctggccccctcctggggccacctcacctgtggatgccagcaggaaggagagagtgaggagaagccacattgtggaggagggaccagggttcggctgcagtctggggagggagtgagagaatccaggtgaggcaggacccttctgcctccaccaggatccctccagacacagacttatcccatccactgttaataaatttcttctgaccaccggtatccccttcccccaaccccactctgcgcttccttctgggtcccccatctctggaaggtttactcttcctctaggcactcggacagaccctgccccacctcctccacctgtcagcctccagcaccatgctaccagcccctggatctctctccatcatcaccaaggacccctgtcccaacttttttttttttttgagacggagtctcactctgtcacccaggctggagtgcagtggcacaatgtcggctcactgcaagctccacctcccaggttcacaccattctcccgcctcagcctcccgagtagctgggactacaggcgcccaccaccgtgcccggctaattttttggaaattttttttttttaagtagagacagggtttcaccgtgttagccaggatggcctcaatctcttgacttcatgatccacccacctcggcctcccaaagtgctgggattacaggcatgagccaccgcgcctggtctatctcaaccctcttatctggccttttgggtccccctccagtccagtcccctccaccagcttgccctccagccatgaccccaaagggtctttctacatctggagctggctgtgcccctcccctgctcaccaccctccatggatccttggcaccaccaggataaagtccagctcttcaaattcactttctttctttttttttcttttttttttttttttttgagacggagtctggctctgtagcccaggttggagtggagtggcgtgatctccgctcactgtaacctctgccttctgggttcaagagattctcctgcctcagcctcccaagcaattgggattacaggtgtgtgccaccacgcccagctaatttttgtaattttagtagagacggagtttcaccatgttggccaggctggtcttgaactcctgacctctagtgatccacccgcctcagcctcccaaagtgctgggattacaggcatgagttgcctggctccagcctcactttcaaggacaaaagtggcttcttcccttccagcccctctccctgggtctcccatgaccttgtcctagacgcagccagtgctgccattttccctcctgccatttcatgcttaggctattcctcccaccgcatatccaacgccattcccttccagccccgcttcctccttgaggccttctctgacctcccctgaccctcagtggtgtctgcctcccctacgagactggcagctccccgaggagctggtctgactccactctgggtctccagtactgcagggcccgacccacgggaggcctcaggaagctttgagggtgaattgaaatccttcttccccatatcttccaaattcatctttgtcctctgacactctgcccccacctcttctgggaggccccaacacctaacaggtgtctcccctgaatcccacagcacccattctgtctccattacagcgcagatgccccatacttgctgaggtctggcctgttcttttctccatctgggggtcttgaagatggggctcaggtcaggttctttctgtgacctcagcactgccccacctggggcctggtacacaggaggcctccgggaggttgtgctgaactgacttgaacccgtgatcactcctgaccacgttcttggctctgatacaagtacttcagggacgtcctcctgatccactccatccccctccctccccaccactgcagctccttctggccattccaggacattttcttggttcaggttcaatttggggcattggtaaaggacacgtggatctacccatgcccttgacactcagttctccaagcgtggtcaacgtttccccttgaaaccagggcacagtgaatctcccctttgcccctccctcagtcttgtctcaaagctctcacctcctccagatcctccagcagcatctagggcagcttgggtgccagaagggagcaggtaccaggatgcctgaatttataagctcccagtcccagctgggtctgggggtgtggtggtgtagggtggggtgggaggtggctgagagtcaggtttacaggcagagacgccttggttgctggtggggtgggagacttggcctaatgagcatttattaggttgaagctgttgtctgagtccacaaagaggaattctccaccaggagcagttcctcaagggggaggggacaggaggacaaaaacagaaattaggaggagatcaaaagacagagtctggaatttggggtctggagtgtggaaactggatcctaaagtccctgttcttgggcttggggcagagttctggatcccgggttctggatccggatctggttctggatctgggtcttggattctggatttgaggatcttgagttggagattaatgacctgcagtctggaatatggatttcaaagtctgagttcttgggctgggggtctggaatctggatcctggagtcgggcctttgagtgacagatcgtgaaccttgattctggatcccggggcattcgaatctagaacccacaataggagcctggaatctggtgtttggaatctggcaatcgaggctggaaacctttgcacctgctatgagaagcctggggcctagactacaaatggtagatttgggattttgaattgtggggtctggattctttttttttttttttctgagatgaagtttcgctcttgtcacccaggctggagtgcaatagcgtgatctcagatcactgcaacctccacttcctgggctcaatagattctcctgcctcagcctcctgagtagctgggattacaggcgaccaccaccacgcccagctaatttttatatttttagtagagacagggtttcaccatgttggccaggctggtgtcgaactcctcatctcaagtgatccacctgactcagcctcctaaagtgctgggattacaggcgtgagacaccatgccaggcttggggtctggattctacagggtggatctagcctctgagctttcaggagtagactttggaacatacagtctggagtttcaaatctgtttttgcattgaaaacctggactgtggctgggcccagtgactcatgcctttgggaggctgaggtaggaggattgctggaactgaagggtttgagaccagcctgggcaacacagcaatacctcatctctatgaaaaatctaaataaataaataaataagtaaataaatttttaaaaggctgaattgagagacagggacctggctttcacgattctgagattgctagaatcttgactctagagtctgaatttagagtctgggaacccagggtctctattctggtcctgtagtcttatttctgggttctagagcttgaaatctggattctgcatcccagaggctggagatgatcactgagatgacccaaggctttgggtatttgaggctggcttccaatgtctcagaaccccagagggccccaagcaattatctagagtctattttggcttaattaatgaggaggtcccaagacaggagggactgacctcactcaggtcacccagtgaaggatgggacctgttgtaagcgtggtctctccccatgtgtggaaagtcatcatctttatgggaaggattcagccattctagaactacaggcccctggaatttctagaatatcagactttcagattctaaaagcacaggccctaagacattctggcagtggaggacactctggaaggtaagattttagaatagcctagaaccacagagctccaaacactctagaaccttcgaacatcgggcactctggagtccccagaaacctcatgcattctagaacgtcgggtctccagacattctacaagcccagaccggcagacataatagatccccaggttggaagctattctagaactcctatgtccctttgcctccctccccacaaattgatgctcaaagtctgcgggcctcaccctgggccaccgcttcagctgagcagccctgtttatggaatgcggctgcaggccactcctccgtgccaagtgctctctttgtaggatctcactccggctcccggcagccctgtgaggtgtttatattaataaccttatggcttcctgctgaatacggaggaaactgaggcccagacaggaggcagcacaagcaaggttcctgcagaagcgagaggccacgcgggagaggaatcagtgttccgactccggaacgcccggtgggccctttcgccgccacccctgcagccgcctccctctgttggggcgcggtggtgacgagggaaaggagccgagcccctgggacttcctcggtgccaggtctgtgctgagcgcttcccgtcacgatcgcacgtgctcctcctcctaaccagcctaggcaggtactgatgaagcacccctgatacagacggggacactgagggcgctcccgccgcgccgaacccaggcgcgcacccggtctgcgctcggctccctggagggcgcgcagccagcggctcccgcagccccgcccccacgcggtgacgtcggcgccccgtccccgcccactgtgtctggctcaggctcgcgcgatcgatgtcctcctggacgtgtccgcggacgtccttcacctccaccgcggcctgggtcccgcccaccgcggcctgagtctcacttttgcccggctcctcctcctgagaacgttccctgggagtttttcatcaactcccgtggttcatccaccaaccacgcaggtctcctccatctgaccctgaactccggcttgggcagccacctgctcctgggcgccccctgcaccactgtccctaggcccctctcacttaccgagtcccaactcattgctctatttccccaaaccctccttccctgttcttccacgttcttcatctcaggggcagcgtcaccgaccacccagttattcggccagacgcccttggcactgaccttgccccatctctccccttatcccctacagcccatcggtccccagccttgtcccttcggcccctgcctctctctgccccgtcccctcctctctgtccccttggcctggctccagctcagacgtcctcctctctctctggaccctcgctcctcctgtccgggaggacagcctcctgtcggtcaccacgtggccctagagggtctctctgcacttggagatcaccccgcccctcccctgctcacagccttcccttgcagctccccatcacccctgggcaaggtcccggcttctcggtctgcagttttaagccctttgagattccccagcaggaaaaagcctcccctcaaacccccttctcagggggcctgcagactgcccacctccggagcgggactggactcgtggtgcccgaagggcctccccatgaggtgctggccctcttctaacttagtctcaccacggcctccgttccttctggaaccagacaagctgctgtttcagggcgctgggtctggatccagacagcatgggtgcagatctctgttccactacttactattttgggagaccctggtaagagttttttcttctctgtgtctcagtttcttatccttaaaatcagaggatcccctcgtagagtttttcgaggagtaacgacttagtttgtgttaggagctcagagcatatagtaaattatgacgattcattcatttaacacatgagcagacgggagtgcgggggtcactggtgaaggtcacccaggctgcagaagtggaatcaagagaatggttctcggggtcctggtgccccttgtgagaagcatcagctctctgggtgtcaggtgctcatctgcgaaggggtcttccgttgcggtggggtggaaatgggagggacctcacaggggttggatgaggtcatacccatggagcaggtgtgcgaatcataaaatcaggctgaggcttgcaagaccggttaacacggcacgtgattcagatgtagccgctggagccaggtggcccgggtttgagttctgcctctgtcccataatactgtgcaccctcaggcaagtcacttagcctctctgtgcctcagctgcctcaactataaagtgggggtaataattgctcctccctcttctgtgggagtgttttgaggtgttcattcttgaaatctgtgcccggcactgagtgagtgctgggccattatcagtctgtcctattacccttgggaactgaaagctggggagggatggttatgtggggtctttctcagatgacacagttgggtagcagcagatttggcactggaagaagccactgtgctttttgttttgttttgttttctgttttttgtttttttttttttttgagacggagtctcgctcttgttgtccaggctggagtgcaatggcatgatcttggctcactgcaacctccgcctcctgggttcaagcgattctcctgcctcagcctcctgagtagctgggattacaggcacccaccagcacagccggctaatttttgtatttttagtagagttggggtttcacagtgttggccaggctggtcttgaactcctgacctcaagtgatccacctgccttggcctcccaaagtgttaggattacaggcgtgagccaccgcgcccagccagaagccactgttttgatctcccagatgtggtatctttttctgaatccctgtgacccctttatcaagacccctgttttacagatgggggaactgaggcccagggagaggaaatggaggtgtgagaccctggtatgagagtgtgacgtcaagcaaagagaatgtcacacgcagacgagttcttctctgagactttatttcctgggctgtgctgggggaagctggaggggaggaggcagaaaaacccacatcttctcttcttttgtcctgggagggccttaccgataggtggcatcaattgtgcgtttgttcatagcagttttactcctgggtctgagggaggaggggctgggggcctggactcctgggtctgaggagggagaggctggtgcctggactcctgggtctgagaaaggagaggctgggggccgggactcctgggactgagggacgggtggctggtgtccaggactcctgggtctcaaggaagaagggctggggggtctgagggaggagggggctggggactcagactcttgggtccaagggaggagcggctggggtctggactcctgggtctgagggaggtgggactgagggcccggactcctgggtttgagggagaaaggcctgggggatctgagggaggaggggctagggtctgaactcctgagtctgagggaggtggggctgagggcctgcactcctgggtctgagagaggaggggctggggggtctgagggaggaggaggctggggggtttgagggaggtagggctggagtctggactcctgggtctgagggaggaggggctgggggcccgcactcctgggtctgagggagctggggctggggaggtctgagagaggtggggctggggggtttaagggaggtggggctggagtctggactcctgggtctgagggaggaggaggctagggacccggactcctgggtcggtgggaggaggggctggggcatcttagggaggtggggctggggcctggactcctgggtcctgcactctggggctgggagagaaaggcctgccctgcctgcgtctccctctctgtgttccacccccacccatagacctcttcgctagagtcctgagcccccagcccactttccagctccctcctcttccctttctggaagcttcccttctgcgtttgttcataggaggtttgctcttgggtctgagggaggaggggctggggtcctgagctcctgggtctaaaggaggaggggctggggagtctgagggaggagggaggtggaggcccagactcctgggtctgagggaggagaagctggtgcctggactcctgggtctgagagaggagaggctgggatctgggactcctgggtctgagggaggaggggctggggtcctggactcctgggtctgaaggaggaggggctggggggtctgagggaggagggagctggggagacgtgtgtcttctccctcccgtgactcctgctcactttccccatgtctgtgtttctgctcccctctccccgtgatcctgtcagcttcttttagtttttattttttagagttggggtcttgctctgttgcccaggctggagtgcaatggtgcaatcatagctcactgctacctcaaactcctgggtttaagcgatcctctggtatcagcctcccgagtagctgggactacaagtgtgtgccaccatacctggctaatttttacgttttgtttttttttttgtggagatggggtcttgatatgttgcccaggctgagattgtaaaaagtcatcatggaacaccccacctcccagtgcaggaaagctggctgtggtattgccaagaatgatgtttattgcagcactattcccaatagctaagatttagagacaacctaagtgtccatcaacaaatgaatggatacagaaaatgtggtacatatacacagtggaacactattcagccatcagaaagaatgagagcctgtcatttgcaacatggatggaactggaggttatgatgttaagtgcaataagtcaggcacagaagataaacttcacaggttctcatttatttttgggagctaaaaattgaaacaattagccgggcactcacacctgtaatcccagcactttgggaggctgaagcaggtggatcacctgaggtaaggagttcaagaccagcctggccaacatggtgaaaccctgtctccactaaaaatacaagaattagccaggcgcagtggcgcgtgcctgtattcccagctacttggaaggctgagacacagaagtgcttgaacctgggaggagggggttgtggtgagccaagacctctccagtgcactccagcgacctgggagacagagcgagactccatctccagaagcctggagaaatagggacaaaaaacaaaaacaaaaccaactgagttaatggagatagacagtagaagcatagttatcagaggctggggagggtgagggtatgtgggtagtggggaagtgcggatggttaatgggtacgaggaaatagaataagatctagtattcgatagcacaacagggtgactgtggtcaataataatttaattgtacatttaaaaacaacaaaaagaatataattagattgtttgtaacacaaagggtgaatgcttgaggtaatggataccccatttaccctcatgtgattattacacattatatgcctatattaaaatatctcatgtaccccataaatatatccacctgctatgtacccacaacaattacaaattagcaaaaaaagaataatgtggctcttgccaggtttcagctccacccttgctgtgtgtgtggcgcgttgcgtccccaggtccctctcagtggtccgtggagagcattaccacctgtcactgtctactatctcagggcagaccctctctcctctctcttcctccatctctgcaccccacaaataaagtggcaacccccccgatgtgtgtctttgcagaacctgaatgtgatgagattgccagaaaatgccagtgtgcccctggatgggtggaggagggtggggcgggtggaggggacaactttgccccattggggaaccactgggctatacctgtcactgaagcttcctttctcccctgcacctgactccacacctcaggacgcaggtcaggagggctgggggatgctctagccttggccaggtgggcctggagatgattgttcactgcaggagcattcacctttttagatgggtgcttcctgtctagagaaggagacacggggagctggaaagagaagcctgcagaaatagggaccgggcaaaaacaaaggagggtggagtcggggagtgtagaagagataaagtaaggactggagtgaggaagaggcatcaaaagagggagggaatggtgaaggcagaaaaccgtgagaaacggggagtgagaagatagcatgagaaagacaggatcaagtcaggcgtggtggctcacgccggtaatcccagcactttgggaggctgaggcgggcggatcatttgaggtcaggagtttgagaccagcctagccaacattgtctctactaaaaatacaaaaattagccaggtgtggtggtgtgtgtctgtaatcccagctactcaagaggctgaggcaggagaatcgcttgaacccatggtggggtggaggttgcagtgagccgagatcgcaccactgtactccagcctgggtgacagagtgagactctgtctcaaaaacaaacaaacaagcaaacaaaaaaaccaggtaaactgaggctgggttttgtatcccagaccaaatgcctgcactttgaatgcctggttgggaagcctgagattatcctgtagggaagcatcgagagcatgaactgaatggtgttaggagacaattatccatggctctcttacctttctgcctgtctcctgaaaaaggtattagccacttttgagttccagattgtctttttatggatgtttctctagagcatcagagcatgtttgttcactgtcttagataataaagataatgtccttccataatgatttatttattggctaggatagtaaatacaacatgtccttccggggcaggtggatcagcagtccgacataacaaagataatatctctccgagtttcaaagtcaagcagatttccttgcatctcccttataagattgaagatttgtaaatacatgtaaacagaggttccccagcattgacgcaaaccactgtgtgcgcagcatctgcctgagccactctgatcatccctgtaggacctggggggcaaggtgagcccatgtgaacatgaatctcatgctgccggctgtgccatgagtaataaagtcctttgtctctgacccggagttgttgtgtgttctgccaatagtttcactggatacaaaattcttggctgataattgttttgtataaggaggctaaagacaggaccacaatcccttctaggttgtagggtttttgctgagaaatctgctgtcaatctaataggttttcctttataggttacctgatgctccttcatcttgactttagataacctgatgactatgtgcctaggggggtcatcttttttttgttttgttttgttttgagatggagtctcactctgttgcccaggctggagtgcagtggtgcgatttcggctcactgcaacgtccgcctcccgggttcaagagactcttccgcctcagcctcccgagtagctgggattacaggtgcgtgccaccacacccggctacttttttatatttttagtagagaaggggtttcactgtgttagccaggatggcctcgatctcctgaccttgtgattggcctgcctaagtctcttaaagttctgggattacaggcgtgaacgactacgcccgaccagtggtcatctttttgcaatgaatttcccaggcgttctttgagcttctcatgtttggatatctagatctctagcaaggccaaggaagattattcccctcaaatatgttttccaaacttttagatttatcttcttccttgggaacatgaattattcttaggttggttgtttaacataatcccaaacttcttggaggtcttgttcattttttaaaaatacttttttctttgtctttgttggattgggttaatccaaaagtcttgtctttgggctcttaagttctttcttctacttgtttgattctattgctgagactttccagtgtattttgcatttctctaagtgtgtccttcatttccagaaattgtaattgtttttgatttacgctatttctctggagatttttctgtccatatccggtaacactttttaaaatttctttaagttggtattcacctttctctggtgccttcttgagtagcttagtaattgatcttctgattttttttttttctggcaatttcagagatttctttttggtttggatccattgttggtgagctggtgtgatctttttggcgtgttaaataaccttgttttgtcgtattaccagaattggttttctggttccttctcctttgtagactatgtcagaaggaagatctgggtctcaagggctgctcagattctggatttagctacccagtggagcgtctgcgctctgggctggtactggggggtgtctgcaaagagtcctgtgatgtgattcatcttcaggtctcttagctgtggatatcagcacctgctccgttggaggtaacagaggagtaaagtagactcgctggggttccttggttgtattattttttagtgcgctggttttgtgttggttggcctccagccaggagacggcactttcaagacagcatcagctgcagtagtacagggaggaaaacagcttgccctagggttacctggataagtattcaggtttctcaggtggaggatggggccagatagcttccaagagagtatgtccttcgtctttggctactagggcaggtagaggaacaccatcaggtgggggcagggttaggggtgtctgagttcagactctccttgggtaagggtcgctgtggctgctgtgtgggggtggggtgtggttctcaggccaatgaggttatgttcccaggggaattatggctgcctctactgcatcatgtgggtcaccagggaagtgggagaaagccagcagtttcagggctcacccagctcccatgcagcccaaaaagctggtctcattcccactgtgtgcatccccaatcaatgcacagtttgtttgcaggcagcaggtgcgcagggctgggaactcgccccaggctacaagcctccctgctgagaaagcaagcagggctttcaggtttcgtgcctccccacctgctgcagcttctgtgctcatgtctgcactcacagttcaccccctcccctgagttctgtccaggaaacttcgtgttcagttgaaattgttgcaaagttcagctggaagcttccttctccctgtagtctttccccaattccgttggcagccctccccaaggacccctgtgagatgaagtcagaaatggcttccctggggaccaacagtaccctcagggctcttcctgctgctttctctaccccccgtatttcattcagctctctaagttcatctcggctccaggtaaggtcaaatccttctcccatgatctggaccttcagattccccagtgaggatgtgtgtgcaggggcggatgatccccccttcacacttttcacactttgagcactcacagtttttcagctgtctcctggagcctgcagcagcaatgtgcttccttcaaagggtctgtgggttctcttggctttcctggtatgttcctgcagtagttcttggagcaaaaattcaagacgtgagtctccacatgctgctctgtccatctgagtgggagctgcaagttagtcctgcttcctagccaccattttctccccacattagctttttgacttttctttatatatatatatatatatatatatatatatatatatatatatatatatatgtttgttttttttaattatactttaagttctagggtacatgtgcacaacgtgcaggtttgttacatatgtatacatgtgccatgttggtgtgctgcacccattaactcgtcatttacattagttatatctcctaatgctatccctccccccacttgacttttcttttttattaattgcctgttcatatgctttgtccatttttttaggggttgctctcttgttcatgtcagaagtttcttgtgccttctaaatggtgatctctttttggttttgaacattgtataagtcatcttttataaatagaaattctgaattcttatacaagtttctggatgacagtgccctctaagcaaaaattctaaattttcctataatgaagtacatccaaattttggtctatgatttgtgcttctgaagttgtgtcaagaagccttttctttgtgttagataacaaaggttatctctcatattttctagcctctctaaccctctctgtttgtccatctgtttctgtatctcatcccatctatatagctattcattaatttctcatttaactgatatttgctagttgtcacaactgtgacttgatgaagataacataaactcataataatatccctcaataagaaaaggaacgataaactagtgtcattagcttataaaccgtgttagattaattggtggatcagaacacttgaaatgtcctgaaatctttcagctgacatttgaaagaaacttactattatttctccccaaattgggcaagaatcctagacaaatcatatgaaatttaaataaataaaagctttgaagctgaaagaaatgtttctaaaggattaataatgaaaaacagattttgatcaaatatgataaaaatgaaattatttttcttcccctagaaaatgagattacaggccgggtgtggtggcttacacttgtaatcctagcactttgggaggccaaggtgagcggatcatgaggtcagtagttcaagatcagcctggccaacatggtgaaaccccgtttctgctaaaaaaaaaaatacaaaaattagccaggtgtggtggcatgcgcctgtagtcccagctgctcgggagactgaggcagaagaattgcttgaacccgggaggcagaggttgcagtaagccaagatcgcaccactgcactccagcctgggcgacagagcgagactctgtctaaaaaaaaaaaaaagaaaagaaaaagaaaatcagattacaaaatcatttgatgataagcagagataactgaagagtatgaggacaaaagaatgtaggagaagaactttataaggcatttaagacaattgctaaattaaaaaattccacatcttctaaattttgcattgattttggtactgtatactcttttgaatagttcccgtattattccttttatcatttagattcgctatttacatttgttatttcttttcccattagattaatctgggttatacctaagtttatattaagaatcttttattctttttttgtttttaagaagctgaagacctcagaaaacctgatcaacatgaaatatggtatgaagtagtactcaataaagagaaaacatgatggtaatcttgaagaaaagcaccatattcatctctgtatgtccttctgtgtccctctctgtccctgggggagggcctctctgaccatctcaggctgttatagtggagattctggaactctggagtggaaggattcctgagacctttctgggggtatgcgaggtcaaacactagtttcataataatctgtacacattatttacctttctcactcttttttttttttttttttttttttttctgagatggagtttcactcttgttgcccaggctggagtgcagtggcacaatctcagctcactgcaacctctgcctcccgggttcaagtgattctcctgcctcagcctcccaagtagctgggattacaggcgcccgccaccacgcctggctaatttttgtatttttagtagagacggagtttcaccatgttgtccaggctggtcttgaactcctgacctcagatgatccgcccgccttggcctgataaagtgctgggattacaggtgtgagccaccacgcctggcacctttctcactcttattctctcacaagcacaaggtggaattttccagagcctacatgctgtgatattgtagcaaattaaaccctgaagcagatatgagagtccagctgccttctattaagccagacattaaagagacttgcaaaagtgcataacattttttctcactagtttttttcttaaaatatagctatttttcattaaaatacattatgttaacatatttattattgttatttaaaaataaattaataactgaatattttaaagatttctcagttttaatatctactgtggtatcaatagatatagttaatataaacaaaaacccatgaaaggccttcagtaattcttttgttttgtttttttttttcgatggagttttgctcttgttacccagggtagagtgcagtggcacaatgttggctcactgcaacctttgccttcccggttaaggtgattctccagcctcagcctcctgagtagctgggattacaggtgcctgccatcacgcccggctaatttttgtatttttagtagagatggggtttcaccgtgttggccaggctggtctcaaactcctgacctcaggtgatctacctgctttagcctcccaaagtgctgggattgcaggcgtgagccaccatgcccggcccaataattcccttttttttttttttttttgagacggagtcttgctctgtcaccaggcaggagtgcagtggcacgatctcggctcactgcactctctgcctcccaggttcaagtgattatcctgcctcatcctcccgagtagctgggattactggtgtgtgccaccacacccagctaatttttttgtatttttagtagaaacaggatttcaccatgttggccaggatggtctcgatctcctgacctcgtgatctgccctcctcggcctcccaaagtactgggattacaggcgtgagccacagcgcctggccccagcccaataattcttaagagtgtaaacatgtcctgagatggcaaatgtttgagaaccaccgttctagacattttcctgaattctagagtgtgggagtgtagaacctggagcttggcttctggagcctagattctggaatttggagctgggatctgaggcttggctgcagcagtgtggggctggcttccggaacacagatctgacatgctcatctgctgcgtggggtttactatctgccttgaatcctaaagtctgcccctgaggagtctggaatctggaatctattatctttagttgaacacctgcagtctgcgttctgctttgcagagctggattctttacccgtgatccgttctggcatttcaacttcacacagaataggccacttcatggtactgttttcaaccaatcaagcaaattaatcgttagagccctttctaattcctctagttgcaatgttaaacccaatatttctgtgtagtgggtccatattaataaattcagcctgatctaaccttatattccttccaccattattccataccaacccttaatatgcattcccacatatatttcctggatttctgtctatataatgggcaatcccggctttgccagtttctagtgacctaacatctctgtgactcatgttattgtactttaaagtggaaataataacagttcctgtacagtttagggcttcccaagatgaccctccattgacatcagttgagattccaggagagtccaaaagatcatccttaaggttcagtcgtttgctaggatgctcatggttgtggtttattacagcaaaaggatacagatgaaaatctggcaagggagaggtgaatgaggcaaagacaaggagaactcaaagtgcgaagcttctagttttcttttcccggtgacatcgtggaaagcactagcatctctaagcaatgatctgtgacaatattcacagtgtattgccatccagggaactcaactgagccttgatgtccagagatttttgtgtttttttctgagactgagtctcgctctgtgcccaggctggagtgcagtggtgcaaccttggctcactgcaagctccgcctcctgggttcacgccattctcctgcctcagcctcctgagtagctgggactacaggcacccgccaccacgcctggctaatttttttgtatttttagtagagatggggtttcactgtgttagccaggatggtctcagtctcctgacctcgtgatctgcccaccttggcctcccaaagtgctgggattacaggcgtgagccactgcgcctggccgatatccagagattttttggggggctccatcacacagacatgttgactgtcttcatggttgacttttagtatccagcccctctagaaatctagctgatatagtgtggctcaaaaccttcagcacaaatcacaccgttagactatctggtgtggcccaaaccttcaggtgaacaaaggcactctaaactggcaggatattccaaagcattagagatgacctcttgcaaagaaaaagaaatggaaaagaaaaagaaagaaaggaaaaaaaaaaaaaaaaagagatgacctctcaggctctgaggggaaacgcctgaggtctttgagcaaggtcagtcctctgttgcacagtctccctcacagggtcattgtgacgatcaaatgtggtcacgtgtatgaggcaccagcacatgcctggctctggggagtgccgtgtaagtgtatgcttgcactgctgaatggctgggatgtgtcagggattatcttcagcacttacagatgctcatctcatcctcacagcatcactatgggatgggtattactggcctcatttgatggagaaactggctgtggctcagaaaggggggaccactagaccagggacactctggatgctggggactccagagaccatgaccactcaccaactgcagagaaattaattgtggcctgatgtccctgtcctggagagggtggaggtggaccttcactaacctcctaccttgaccctctcttttagggctctttctgacctccaccatgatactaggaccccattgtattctgtaccctcttgactctatgacccccactgcccactgcatccagctgggtcccctcctatctctattcccagctggccagtgcagtctcagtgcccacctgtttgtcagtaactctgaaggggctgacattttactgacttgcaaacaaataagctaactttccagagttttgtgaatgctggcagagtccatgagactcctgagtcagaggcaaaggcttttactgctcacagcttagcagacagcatgaggttcatgttcacattagtacaccttgccccccccaaatcttgtagggtgaccagagcagtctaggtggatgctgtgcacacggggtttgtgccactggtgagaaacctgagattaggaatcctcaatcttatactgggacaacttgcaaacctgctcagcctttgtctctgatgaagatattatcttcatgatcttggattgaaaacagacctactctggaggaacatattgtatcgattgtccttgacagtaaacaaatctgttgtaagagacattatctttattatctaggacagtaagcaagcctggatctgagagagatatcatcttgcaaggatgcctgctttacaaacatccttgaaacaacaatccagaaaaaaaaaggtgttgctgtctttgctcagaagacacacagatacgtgacagaaccatggagaattgcctcccaacactgttcagccagagccttccacccttgtctgcaggacagtctcaacgttccaccattaaatacttcttctgtcacatcctgcttatttatgcctaaccaaggttctaggtcccgatcgactgtgtctggcagcactccactgccaaacccagaataaggcagcgctcaggatcccgaaggggcatggctggggatcagaacttctgggtttgagtgaggagtgggtccaccctcttgaatttcaaaggaggaagaggctggatgtgaaggaactgggggagggaaagtgtcagttccgaactcttaggtcaatgagggaggagactggtaaggtcccagctcccgaggtactgatgtgggaatggcctaagaatctcatatcctcaggaagaaggtgctggaatcctgaggggtagagttctgggtatatttgtggcttaaggctctttggcccctgaagggcagaggctggaaccattaggtccagggtttggggtgatagtaatgggatctcttgattcctcaagagtctgaggatcgagggttgcccattcttccatcttgccacctaatccttactccacttgagggtatcaccagcccttctagctccatgaaggtgcccctgggcaagcacaatctgagcatgaaagatgccccagaggccttgggtgtcatccactcatcatccagcatccacactctgagggtgtggccagcaccatgacgtcatgttgctgtgactatccctgcagcgtgcctctccagccacctgccaaccgtagagctgccgacatcctcctctggtgggagtggcctgcatggtgccaggctgaggcctagtgtcagacagggagcctggaatcatagggatccaggactcaaaagtgctagagaatggccatatgtcaccatccatgaaatctcaagggcttctgggtggagggcacagggacctgaacttatgggttttccccaagtctattgctctcccaagtgagtctcccagatacgaggcactgtgccagcatcagccttatctccaccacatcttgtaaaagggactacccagggccctgatgaacaccatggtgtgtacaggagtagggggtggaggcacggactcctgtgaggtcacagccaagggagcatcatcatgggtggggaggaggcaatggacaggcttgagaacggggatgtggttgtatttggttttctttggttagataaagtgctgggtataggattgagagtggagtatgaagaccagttaggatggaggatcagattggagttgggttagagatggggtaaaattgtgcttcggatgagtttgggattgacactgtggaggtggtttgggatggcatggctttgggatggaaatagatttgttttgatgttggctcagacatccttggggattgaactggggatgaagctgggtttgattttggaggtagaagacgtggaagtagctgtcagatttgacagtggccatgagttttgtttgatggggaatcaaacaatgggggaagacataagggttggcttgttaggttaagttgcgttgggttgatggggtcggggctgtgtataatgcagttggattggtttgtattaaattgggttgggtcaggttttggttgaggatgagttgaggatatgcttggggacaccggatccatgaggttctcactggagtggagacaaacttcctttccaggatgaatccggggaagccttaattcacgtgtaggggaggtcaggccactggctaagtatatccttccactccagctctaagatggtcttaaattgtgattatctatatccacctctgtctccctcactgtgcttggagtttacctgatcactcaactagaaacaggggaagattttatcaaattctttttttttttttttttttttttgagacagagtctcactctgttgcccaggctggagtgcagtggcgcagtctcggctcactgcaacctctgcctcccaggttcaagtgattctcctgcctcagcctcctgagttgctgggattacaggcatgcagcaccatgcccagctaatttttgtatttttagtagagatggggtttcaccaatgtttgccaggctggcctcgaactcctgacctggtgatccacctgcctcagcctcccaaagtgctgggattacaggcgtcagccaccgcgcccagccacttttgtcaaattcttgagacacagctcgggctggatcaagtgagctactctggttttattgaacagctgaaataaccaactttttggaaattgatgaaatcttacggagttaacagtggaggtaccagggctcttaagagttcccgattctcttctgagactacaaattgtgattttgcatgccaccttaatctttttttttttttttttaaatcgaggtttcagtctcattctatttcccaggctggagttcaatggcgtgatcacagctcactgtagccttgaactcctggccttaagagattctcctgcttcggtctcccaatagctaagactacagtagtccaccaccatatccagataatttttaaattttttggggggccgggcacagtggctcacgcctgtaatcccaacaccatgggaggctgagatgggtggatcacgaggtcaggagtttgagaccagcctgaccaacatggtgaaactctgtctctactaaaaaaaaaaaaaatagaaaaattagccgggcgtggtggcacacggcacctgtaatcccagctactgaggaggctgaggcaggagaatcacttgaacccagaaggcagaggttgcaatgagccgagattgcgccactgcactccagcctgggtgacagagtgagactctgtctcaaaaaaaaaaaattttttttttttttttgtagagatggatcttgctttgtttctctggttggccttgaactcctggcttcaagtgatcctcctaccttggcctcggaaagtgttgggattacaggcgtgagccaccatgactgacctgtcgtttaatcttgaggtacataaacctggctcctaaaggctaaatattttgttggagaaggggcattggattttgcatgaggatgattctgacctgggagggcaggtcagcaggcatctctgttgcacagatagagtgcacaggtctggagaacaaggagtggggggttattggaattccacattgtttgctgcacgttggattttgaaatgctagggaactttgggagactcatatttctgggctagaggatctgtggaccacaagatctttttatgatgacagtagcaatgtatctgtggagctggattctgggttgggagtgcaaggaaaagaatgtactaaatgccaagacatctatttcaggagcatgaggaataaaagttctagtttctggtctcagagtggtgcagggatcagggagtctcacaatctcctgagtgctggtgtcttagggcacactgggtcttggagtgcaaaggatctaggcacgtgaggctttgtatgaagaatcggggatcgtacccaccccctgtttctgtttcatcctgggcgtgtctcctctgcctttgtcccctagatgaagtctccatgagctacagggcctggtgcatccagggtgatctagtaattgcagaacagcaagtgctagctctccctccccttccacagctctgggtgtgggagggggttgtccagcctccagcagcatggggagggccttggtcagcctctgggtgccagcagggcaggggcggagtcctggggaatgaaggttttatagggctcctgggggaggctccccagccccaagcttaccacctgcacccggagagctgtgtcaccatgtgggtcccggttgtcttcctcaccctgtccgtgacgtggattggtgagaggggccatggttggggggatgcaggagagggagccagccctgactgtcaagctgaggctctttcccccccaacccagcaccccagcccagacagggagctgggctcttttctgtctctcccagccccactccaagcccatacccccagcccctccatattgcaacagtcctcactcccacaccaggtccccgctccctcccacttaccccagaactttctccccattgcccagccagctccctgctcccagctgctttactaaaggggaagttcctgggcatctccgtgtttctctttgtggggctcaaaacctccaaggacctctctcaatgccattggttccttggaccgtatcactggtccacctcctgagcccctcaatcctatcacagtctactgacttttcccattcagctgtgagtgcccaaccctatcccagagaccttgatgcttggcctcccaatcttgccctaggatacccagatgccaaccagacacctccttcttcctagccaggctatctggcctgagacaacaaatgggtccctcagtctggcaatgggactctgagaactcctcattccctgactcttagccccagactcttcattcagtggcccacattttccttaggaaaaacatgagcatccccagccacaactgccagctctctgattccccaaatctgcatccttttcaaaacctaaaaacaaaaagaaaaacaaataaaacaaaaccaactcagaccagaactgttttctcaacctgggacttcctaaactttccaaaaccttcctcttccagcaactgaacctcgccataaggcacttatccctggttcctagcaccgcttatcccctcagaatccacaacttgtaccaagtttcccttctcccagtccaagaccccaaatcaccacaaaggacccaatccccagactcaagatatggtctgggcgctgtcttgtgtctcctaccctgatccctgggttcaactctgctcccagagcatgaagcctctccaccagcaccagccaccaacctgcaaacctagggaagattgacagaattcccagcctttcccagctccccctgcccatgtcccaggactcccagccttggttctctgcccccgtgtcttttcaaacccacatcctaaatccatctcctatccgagtcccccagttcctcctgtcaaccctgattcccctgatctagcaccccctctgcaggtgctgcacccctcatcctgtctcggattgtgggaggctgggagtgcgagaagcattcccaaccctggcaggtgcttgtggcctctcgtggcagggcagtctgcggcggtgttctggtgcacccccagtgggtcctcacagctgcccactgcatcaggaagtgagtaggggcctggggtctggggagcaggtgtctgtgtcccagaggaataacagctgggcattttccccaggataacctctaaggccagccttgggactgggggagagagggaaagttctggttcaggtcacatggggaggcagggttggggctggaccaccctccccatggctgcctgggtctccatctgtgttcctctatgtctctttgtgtcgctttcattatgtctcttggtaactggcttcggttgtgtctctccgtgtgactattttgttctctctctccctctcttctctgtcttcagtctccatatctccccctctctctgtccttctctggtccctctctagccagtgtgtctcaccctgtatctctctgccaggctctgtctctcggtctctgtctcacctgtgccttctccctactgagcacacgcatgggatgggcctggggggaccctgagaaaaggaagggctttggctgggcgcggtggctcacacctgtaatcccagcactttgggaggccaaggcaggtagatcacctgaggtcaggagttcgagaccagcctggccaactggtgaaaccccatctctactaaaaatacaaaaaattagccaggcgtggtggcgcatgcctgtagtcccagctactcaggaggctgagggaggagaattgcttgaacctgggaggtggaggttgcagtgagccgagaccgtgccactgcactccagcctgggtgacagagtgagactccgcctcaaaaaaaaaaaaaaaaaaaaagaaaagaaaagaaaagaaaaggaagtgttttatccctgatgtgtgtgggtatgagggtatgagagggcccctctcactccattccttctccaggacatccctccactcttgggagacacagagaagggctggttccagctggagctgggaggggcaattgagggaggaggaaggagaagggggaaggaaaacagggtatgggggaaaggaccctggggagcgaagtggaggatacaaccttgggcctgcaggccaggctacctacccacttggaaacccacgccaaagccgcatctacagctgagccactctgaggcctcccctccccagcggtccccactcagctccaaagtctctctcccttttctctcccacactctatcatcccccggattcctctctacttggttctcattcttcctttgacttcctgcttccctttctcattcatctgtttctcactttctgcctggttttgttcttctctctctctttctctggcccatgtctgtttctctatgtttctgtcttttctttctcatcctgtgtattttcggctcaccttgtttgtcactgttctcccctctgccctttcattctctctgtccttttaccctcttcctttttcccttggtttctctcagtttctgtatctgcccttcaccctctcacactgctgtttcccaactcgttgtctgtatttttggcctgaactgtgtcttccccaaccctgtgtttttctcactgtttctttttctcttttggagcctcctccttgctcctctgtcccttctctctttccttatcatcctcgctcctcattcctgcgtctgcttcctccccagcaaaagcgtgatcttgctgggtcggcacagcctgtttcatcctgaagacacaggccaggtatttcaggtcagccacagcttcccacacccgctctacgatatgagcctcctgaagaatcgattcctcaggccaggtgatgactccagccacgacctcatgctgctccgcctgtcagagcctgccgagctcacggatgctgtgaaggtcatggacctgcccacccaggagccagcactggggaccacctgctacgcctcaggctggggcagcattgaaccagaggagtgtacgcctgggccagatggtgcagccgggagcccagatgcctgggtctgagggaggaggggacaggactcctaggtctgagggaggagggccaaggaaccaggtggggtccagcccacaacagtgtttttgcctggcccgtagtcttgaccccaaagaaacttcagtgtgtggacctccatgttatttccaatgacgtgtgtgcgcaagttcaccctcagaaggtgaccaagttcatgctgtgtgctggacgctggacagggggcaaaagcacctgctcggtgagtcatccctactcccaagatcttgaggggaaaggtgagtggggaccttaattctgggctggggtctagaagccaacaaggcgtctgcctcccctgctccccagctgtagccatgccacctccccgtgtctcatctcattccctccttccctcttctttgactccctcaaggcaataggttattcttacagcacaactcatctgttcctgcgttcagcacacggttactaggcacctgctatgcacccagcactgccctagagcctgggacatagcagtgaacagacagagagcagcccctcccttctgtagcccccaagccagtgaggggcacaggcaggaacagggaccacaacacagaaaagctggagggtgtcaggaggtgatcaggctctcggggagggagaaggggtggggagtgtgactgggaggagacatcctgcagaaggcgggagtgagcaaacacctgccgcaggggaggggagggccctgcggcacctgggggagcagagggaacagcatctggccaggcctgggaggaggggcctagagggcgtcaggagcagagaggaggttgcctggctggagtgaaggatcggggcagggtgcgagagggaagaaaggacccctcctgcagggcctcacctgggccacaggaggacactgcttttcctctgaggagtcaggaactgtggatggtgctggacagaagcaggacagggcctggctcaggtgtccagaggctgccgctggcctccctatgggatcagactgcagggagggagggcagcagggatgtggagggagtgatgatggggctgacctgggggtggctccaggcattgtccccacctgggcccttacccagcctccctcacaggctcctggccctcagtctctcccctccactccattctccacctacccacagtgggtcattctgatcaccgaactgaccatgccagccctgccgatggtcctccatggctccctagtgccctggagaggaggtgtctagtcagagagtagtcctggaaggtggcctctgtgaggagccacggggacagcatcctgcagatggtcctggcccttgtcccaccgacctgtctacaaggactgtcctcgtggaccctcccctctgcacaggagctggaccctgaagtcccttccccaccggccaggactggagcccctacccctctgttggaatccctgcccaccttcttctggaagtcggctctggagacatttctctcttcttccaaagctgggaactgctatctgttatctgcctgtccaggtctgaaagataggattgcccaggcagaaactgggactgacctatctcactctctccctgcttttacccttagggtgattctgggggcccacttgtctgtaatggtgtgcttcaaggtatcacgtcatggggcagtgaaccatgtgccctgcccgaaaggccttccctgtacaccaaggtggtgcattaccggaagtggatcaaggacaccatcgtggccaacccctgagcacccctatcaaccccctattgtagtaaacttggaaccttggaaatgaccaggccaagactcaagcctccccagttctactgacctttgtccttaggtgtgaggtccagggttgctaggaaaagaaatcagcagacacaggtgtagaccagagtgtttcttaaatggtgtaattttgtcctctctgtgtcctggggaatactggccatgcctggagacatatcactcaatttctctgaggacacagataggatggggtgtctgtgttatttgtggggtacagagatgaaagaggggtgggatccacactgagagagtggagagtgacatgtgctggacactgtccatgaagcactgagcagaagctggaggcacaacgcaccagacactcacagcaaggatggagctgaaaacataacccactctgtcctggaggcactgggaagcctagagaaggctgtgagccaaggagggagggtcttcctttggcatgggatggggatgaagtaaggagagggactggaccccctggaagctgattcactatggggggaggtgtattgaagtcctccagacaaccctcagatttgatgatttcctagtagaactcacagaaataaagagctgttatactgtggtttattctggtttgttacattgacaggagacacactgaaatcagcaaaggaaacaggcatctaagtggggatgtgaagaaaacagggaaaatctttcagttgttttctcccagtggggtgttgtggacagcacttaaatcacacagaagtgatgtgtgaccttgtgtatgaagtatttccaactaaggaagctcacctgagccttagtgtccagagtttttattgggggtctgtaggataggcatggagtactggaatagctgaccttaacttctcagacctgaggttcccaagagttcaagcagatacagcatggcctagagcctcagatgtacaaaaacaggcattcatcatgaatcgcactgttagcatgaatcatctggcacggcccaaggccccaggtataccaaggcacttgggccgaatgttccaagggattaaatgtcatctcccaggagttattcaagggtgagccctgtacttggaacgttcaggctttgagcagtgcagggctgctgagtcaaccttttactgtacaggggggtgagggaaagggagaagatgaggaaaccgcctagggatctggttctgtcttgtggccaagtggaccatggggctatcccaagaaggaggaattcagaaataggggaaggttgaggaaggacactgaactcaaaggggatacagtgattggtttatttgtcttctcttcacaacattggtgctggaggaattcccaccctgaggttatgaagatgtctgaacacccaacacatagcactggagatatgagctcgacaagagtttctcagccacagagattcacagcctagggcaggaggacactgtacaccaggcagaatgacatgggaattgcgctcacgattggcttgaagaagcaaggactgtgggaggtgggctttgtagtaacaagagggcagggtgaactctgattcccatgggggaatgtgatggtcctgttacaaatttttcaagctggcagggaataaaacccattacggtgaggacctgtggagggcggctgccccaactgataaaggaaatagccaggtgggggcctttcccattgtaggggggacatatctggcaatagaagcctttgagaccctttagggtacaagtactgaggcagcaaataaaatgaaatcttatttttcaactttatactgcatgggtgtgaagatatatttgtttctgtacagggggtgagggaaaggaggggaggaggaaagttcctggaggtctggtttggtcttgtgatccagggggtcttggaactatttaaattaaattaaattaaaacaagcgactgttttaaattaaattaaattaaattaaattaaattaaattaaattttactttattttatcttaagttctgggctacatgtgcaggacgtgcagctttgttacataggtaaacatgtgccatggtggtttgctgtacctatcaacccatcacctaggtattaagcccagcatgcattagctgtttttcctgacgctctccctctccctgactcccacaacaggccccagtgtgtgttgttcccctccctgtgtccatgtgttctcattgttcagctcccacttataagtgagaacatgtggtgtttggttttctgtttctgtgttagtttgctgaggataatggcttccacctccatccatgttcctgcaaaggacgtgatcttattcttttttatggttgcatagaaattgtttttacaaatccaattgatattgtatttaattacaagttaatctaattagcatactagaagagattacagaagatattaggtacattgaatgagaaaatatataaaataggacgaaggtgaaatattaggtaggaaaagtataatagttgaaagaagtaaaaaaaaatatgcatgagtagcagaatgtaaaagaggtgaagaacgtaatagtgactttttagaccagattgaaggacagagacagaaaaattttaaggaattgctaaaccatgtgagtgttagaagtacagtcaataacattaaagcctcaggaggagaaaagaataggaaaggaggaaatatgtgaataaatagtagagacatgtttgatggattttaaaatatttgaaagacctcacatcaaaggattcataccgtgccattgaagaggaagatggaaaagccaagaagccagatgaaagttagaaatattattggcaaagcttaaatgttaaaagtcctagagagaaaggatggcagaaatattggcgggaaagaatgcagaacctagaatataaattcatcccaacagtttggtagtgtgcagctgtagccttttctagataatacactattgtcatacatcgcttaagcgagtgtaaaatggtctcctcactttatttatttatatatttatttagttttgagatggagcctcgctctgtctcctaggctggagtgcaatagtgcgataccactcactgcaacctctgcctcctctgttcaagtgattttcttacctcagcctcccgagtagctgggattacaggtgcgtgccaccacacccggctaatttttgtattttttgtagagacggggttttgccatgttggccaggctggtcttgaactcctgacatcaggtgatccacctgccttggcctcctaaagtgctgggattacaggcatgagccaccgtgcccaatcactttatttattttttatttttatttttaaatttcagcttctatttgaaatacagggggcacatatataggattgttacatgggtatattgaactcaggtagtgatcatactacccaacaggtaggttttcaacccactccccctcttttcctccccattctagtagtgtgcagtgtctattgttctcatgtttatgtctatgtgtgctccaggtttagctcccacctgtaagtgagaacgtgtggtatttgattttctgtccctgtgttaattcacttaggattatggcttccagctccattcatattgctgtaaaggatatgattcatttttcatggccatgcagtattccatattgcgtatagatcacattttctttcttttttttttttgagacggagtcttgctttgctgcctaggctggagtgcagtagcacgatctcggctcactgcaagcttcacctccggggttcacgtcattcttctgtctcagcttcccaagtagctgggactacaggcgcccgccaccacgtccggctaatttttttgtgtgtttttagtagagatgggggtttcactgtgttagccaggatggtcttgatctcctgaccttgtggtccacctgcctcggtctcccaaagtgctgggattacaggggtgagccactgcgcccggcccatatataccacattttctttaaccaatccaccattgatgggcaactaggtagattccatggattccacagttttgctattgtgtgcagtgtggcagtagacatatgaatgaatgtgtctttttggtataatgatttgcattcctttgggtatacagtcattaataggagtgctgggttgaacggtggctctgtttaaaattctttgagaattttccaaactgtttgccatagagaacaaactaatttacatttccacgaacagtatataagcattcccttttctccacagctttgtcatcatggtttttttttctttattttaaaaaagaatatgttgttgttttcccagggtacatgtgcaggatgtgcaggtttgttacataggtagtaaacgtgagccatggtggtttgctgcacctgtcaacccattacctgggtatgaagccctgcctgcattagctcttttccctaatgctctcactactgccccaccctcaccctgacagggcaaacagacaacctacagaatgggaggaaatttttgcaatctattcatctgacaaaggtcaagaatatccagaatctacaaggaacttaagcaaatttttactttttaataatagccactctgactggcgtgaaatggtatctcattgtggttttcatttgaatttctctgatgatcagtgacaatgagcattttttcatatttgttggctgcttgtacgtcttttgagaagtgtctcttcatgccttttggccactttaatgggattattttttgctttttagtttaagttccttatagattctggatattagacttcttattggatgcatagtttgtgaatactctcttccattctgtaggttgtctgtttactctattgatggcttcttttgctgtgccgaagcatcttagtttaattagaaaccacctgccaatttttgtttttgttgcaattgcttttggggacttagtcataaactctttgccaaggtctgggtcaagaagagtatttcctaggttttcttctagaattttgaaagtctgaatgtaaacatttgcatttttaatgcatcttgagttagcttttgtatatgtgaaaggtctactctcattttctttccctctttctttctttcttttctttccctctttctttctttcttttctttctttctttctttctttctttctttctttctttctttctttttgtccttctttctttctttctctttctttctctctttctttttttttttttttgatggagtattgctctgttgcccaggctgcagtgcagtggcacgatcttggctcactgcaacctctgcctcctgggttcaactgattctcctgcatcagccttccaagtagctgggattataggcgcccgccaccacgcccgactaatttttgtatttttagtagagacggggttgtgccatgttggccaggctggtttgaaactcctgacctcaaacgatctgcctgccttggcctcccaaagtgctgggattacaggtgtgagccactgtgcccagccaagaatgtcattttctaagaggtccaagaacctcaagatattttgggaccttgagaagagaggaattcatacaggtattacaagcacagcctaatggcaaatctttggcgtggcttggcttcaagactttaggctcttaaaagtcgaatccaaaattttttataaaagctccagctaagctaccttaaaaggggcctgtatggctgatcactcttcttgctatactttacacaaataaacaggccaaatataatgaggccaaaatttattttgcaaataaattggtcctgctatgatttactcttggtaagaacagggaaaatagagaaaaatttagattgcatctgacctttttttctgaatttttatatgtgcctacaatttgagctaaatcctgaattattttctggttgcaaaaactctctaaagaagaacttggttttcattgtcttcgtgacacatttatctggctctttactagaacagttttcttgtttttggtgttctagcttgtgtgccttacagttctactcttcaaattattgttatgtgtatctcatagttttccttcttttgagaaaactgaagccatggtattctgaggactagagatgactcaacacagctggtgaatctcctcatatgcaatccactgggcttgatctgcttcagattgctgatgcactgctgctaaagctatacatttaaaaccctcactaaaggatcagggaccatcatggaagaggaggaaacatgaaattgtaagagccagattcggggggtagagtgtggaggtcagagcaactccaccttgaataagaaggtaaagcaacctatcctgaaagctaacctgccatggtggcttctgattaacccctgttctgggaagactgacagtttgggtctgtgtcattgcccaaatctcatgttaaattgtaatccccagtgttcggaggtgggacttggtggtaggtgattcggtcatgggagtagattttcttctttgtggtgttacagtgatagtgagtgagttctcgtgagatctggtcatttaaaagtgtgtggcccctcccctccctctcttggtcctcctactgccatgtaagatacctgctcctgctttgccttctaccataagtaaaagccccctgaggcctccccagaagcagatgccaccatgcttcctgtacagcctgcagaaccatcagccaattaaacctcttttctgtataaattaccagtcttgagtatttctttacagcagtgtgagaacggactaatacaaggatctccaaaattccaagtttatgtattctttcttgccaaatagcaggtatttaccataaatcctgtccttaggtcaaacaaccttgatggcatcgtacttcaattgtcttacacattccttctgaatgactcctcccctatggcatataagccctgggtcttgggggataatggcagaggggtccaccatcttgtctggctgccacctgagacacagacatggcttctgttggtaagtctctattaaatgtttctttctaagaaactggatttgtcagcttgtttctttggactctcagcttcctcagactttggggtaggttgcacaaccctgcccaccatgaaacaaatgtttaatatgataaatatggatagatataatccacataaataaaagctcttggagggccctcaataattgttaagagtgtaaatgtgtccaaagatggaaaatgtttgagaactactgtcccagagattttcctgagttctagagtgtgggaatatagaacctggagcttggcttcttcagcctagaatcaggagtatggggctgaagtctgaagcttggcttcagcagtttggggttggcttccggagcacatatttgacatgttgcgactgtggtttggggtttggtatttgctctgaatcctaatgtctgtccttgaggcatctagaatctgaaatctgtggtcagaattctattatcttgagtaggacatctccagtcctggttctgccttctagggctggagtctgtagtcagtgacccggtctggcatttcaacttcatatacagtgggctatcttttggtccatgtttcaaccaaacaaccgaataaaccattagaacctttccccacttccctagctgcaatgttaaacctaggatttctgtttaataggttcatatgaataatttcagcctgatccaactttacattccttctaccgttattctacacccaccttaaaaatgcattcccaatatattccctggattctacctatatatggtaatcctggctttgccagtttctagtgcattaacatacctgatttacattcttttactttaaagtggaaataagagtccctctgcagagttcaggagttctcaagatggcccttacttctgacatcaattgagatttcaagggagtcaccaagatcatcctcaggttcagtgattgctggtagccctcatataactcaatgaaagctgttatgctcatggctatggtttattacagcaaaagaatagagatgaaaatctagcaagggaagagttgcatggggcaaagacaaggagagctccaagtgcagagattcctgttgttttctcccagtggtgtcatggaaagcagtatcttctccatacaatgatgtgtgataatattcagtgtattgccaatcagggaactcaactgagccttgattatattggagcttggttgcacagacatgtcgaccaccttcatggctgaactttagtacttagcccctccagacgtctacagctgataggctgtaacccaacattgtcaccataaatcacattgttagactatccagtgtggcccaagctcccgtgtaaacacaggcactctaaacaggcaggatatttcaaaagcttagagatgacctctcaggagctgaatgcaaagacctggcctctttgggcaaggagaatcctttactgcacactctccttcacagggttattgtgaggatcaaatgtggtcatgtgtgtgagacaccagcacatgtctggctgtggagagtgacttctatgtgtgctaacattgctgagtgctaagaaagtattaggcatggctttcagcactcacagatgctcatctaatcctcacaacatggctacagggtgggcactactagcctcatttgacagaggaaaggactgtggataagaagggggtgaccaataggtcagagtcattctggatgcaaggggctccagaggaccatgattagacattgtctgcagagaaattatggctggatgtctctgccccggaaagggggatgcactttccttgaccccctatctcagatcttgactttgaggttatctcagacttcctctatgataccaggagcccatcataatctctctgtgccctctccccttcctcagtcttactgcccactcttcccagctccatctccagctggccaggtgtagccacagtacctaactctttgcagagaactataaatgtgtatcctacaggggagaaaaaaaaaagaactctgaaagagctgacattttaccgacttgcaaacacataagctaacctgccagttttgtgctggtagaactcatgagactcctgggtcagaggcaaaagattttattacccacagctaaggaggcagcatgaactttgtgttcacatttgttcactttgccccccaattcatatgggatgatcagagcagttcaggtggatggacacaggggtttgtggcaaaggtgagcaacctaggcttagaaatcctcaatcttataagaaggtaccagcaaacttgtccagtctttgtatctgacggagatattatctttataattgggttgaaagcagacctactctggaggaacatattgtatttattgtcctgaacagtaaacaaatctgctgtaaaatagacgttaactttattatctaaggcagtaagcaaacctagatctgaaggcgataccatcttgcaaggctatctgctgtacaaatatgcttgaaaagatggtccagaaaagaaaacggtattattgcctttgctcagaagacacacagaaacataagagaaccatggaaaattgtctcccaacactgttcacccagagccttccactcttgtctgcaggacagtcttaacatcccatcattagtgtgtctaccacatctggcttcactgtgcctaaccaagatttctaggtccagttccccaccatgtttggcagtgccccactgccaaccccagaataagggagtgctcagaatttcgaggggacatgggtggggatcagaacttctgggcttgagtgcagagggggcccatactccttggttccgaaggaggaagaggctggaggtgaatgtccttggagaggaggaatgtgggttctgaactcttaaatccccaagggaggagactggtaaggtcccagcttccgaggtactgacgtgggaatggcctgagaggtctaagaatcccgtatcctcgggaagaaggggctgaaattgtgaggggttgagttgcaggggtttgttagcttgagactccttggtgggtccctgggaagcaaggactggaaccattggctccagggtttggtgtgaaggtaatggaatctcctgattctcaaagggtcagaggactgagagttgcccatgctttgatctttccatctactccttactccacttgagggtaatcacctactcttctagttccacaagagtgcgcctgcgcgagtataatctgcacatgtgccatgtcccgaggcctggggcatcatccactcatcattcagcatctgcactatgcgggcgaggccggcgccatgacgtcatgtagctgcgactatccctgcagcgcgcctctcccgtcacgtcccaaccatggagctgtggacgtgcgtcccctggtggatgtggcctgcgtggtgccaggccggggcctggtgtccgataaagatcctagaaccacaggaaaccaggactgaaaggtgctagagaatggccatatgtcgctgtccatgaaatctcaaggacttctgggtggagggcacaggagcctgaacttacgggtttgccccactccactgtcctcccaagtgagtctcccagatacgaggcactgtgccagcatcagcttcatctgtaccacatcttgtaacagggactacccagggccctgatgaacaccatggtgtgtgcaggaagagcgggtgaaggcacggactcctgtgtggtcagagcccagagggggccatgacgggtggggaggaggctgtggactggctcgagaagtgggatgtggttgtgtttgatctcctttggccagataaagtgctggatatagcattgaaaacggagtatgaagaccagttagaatggagggtcaggttggagttgagttacagatggggtaaaattctgcttcggatgagtttggggattggcaatttaaaggtggtttgggatggcatggctttgggatggaaataggtttgtttttatgttggctgggaagggtgtggggattgaattggggatgaagtaggtttagttttggagatagaatacatggagctggctattgcatgcgaggatgtgcattagtttggtttgatctttaaatgaaggaggctattagggttgtcttgaattagattaagttgtgttgggttgatgggttgggcttgtgggtgatgtggttggattgggctgtgttaaattggtttgggtcaggttttggttgaggttatcatggggatgaggatatgcttgggacactggattcaggtggttctcattcaagctgaggcaaatttcctttcagacggtcattccagggaacgagtggttgtgtgggggaaatcaggccactggctgtgaatatccctctatcctggtcttgaattgtgattatctatgtccacttctgtctccttcactgtacttggaattgatctggtcattcagctggaaatgggggaagattttgtcaaattcttgagacacagctgggtctggatcagcgtaagctgctctggttttattgaacagatgaaatcacattttttttttcaaaatcaaagaaatcttatagagttaacagtggactcttataataagagttaacaccaggactcttattcttgattcttttctgagacaccaaaatgagatttctcaatgccaccctaattctttttttttttttttttttttttgagacacagtctgggtcttttgctctgtcactcaggctggagcgcagtggtgtgatcatagctcactgaacccttgacctcctggacttaagggatcctcctgcttcagcctcctgagtagatggggctacaggtgcttgccaccacacctggctaattaaattttttttttttttttgtagagaaagggtctcactttgttgccctggctgatcttgaacttctgacttcaagtgattcttcagccttggactcccaaagcactgggattgctggcatgagccactcaccgtgcctggcttgcagcttaatcttggagtgtataaacctggctcctgatagctagacatttcagtgagaaggaggcattggattttgcatgaggacaattctgacctaggagggcaggtcaacaggaatccccgctgtacctgtacgttgtacaggcatggagaatgaggagtgaggagccaccggaaccccatattgtttagtggacattggattttgaaataatagggaacttggtctgggagagtcatatttctggattggacaatatgtggtatcacaaggttttatgatgagggagaaatgtatgtggggaaccattttctgagtgtggaagtgcaagaatcagagagtactgaatgccaacgcttctatttcaggaacatggtaagttggaggtccagcttctgggctcagacgggtatagggaccaggaagtctcacaatccgatcattctgatatttcagggcatattaggtttggggtgcaaaggaagtacttgggacttaggcacatgagactttgtattgaaaatcaatgattggggctggccgtggtggctcacgcctgtaatctcatcactttgggagaccgaagtgggaggatggcttgagcccaggagttggagaccagcctaggcaacatagccagaccctctctctacaaaaaaattaaaaattagctggatgtggtggtgcatgcttgtggtctcagctatcctggaggctgagacaggagaatcggttgagtctgggagttcaaggctacagggagctgcgatcacgccgctgcactccagcctgggaaacagagtgagactgtctcagaatttttttaaaaaagaatcagtgatcatcccaacccctgttgctgttcatcctgagcctgccttctctggctttgttccctagatcacatctccatgatccataggccctgcccaatctgacctcacaccgtgggaatgcctccagactgatctagtatgtgtggaacagcaagtgctggctctccctccccttccacagctctgggtgtgggagggggttgtccagcctccagcagcatggggagggccttggtcagcatctaggtgccaacagggcaagggcggggtcctggagaatgaaggctttatagggctcctcagggaggccccccagccccaaactcaccacctggccgtggacacctgtgtcagcatgtgggacctggttctctccatcgccttgtctgtggggtgcactggtgagattggggggataaaggaaggggggcgggttctgactcttatgctgaagcccttttcctcccacccagtgccccagcctcgtcccttcagcccacagttcagcccagacaatgtgcccctgactcttccacattgcaatagtcctcatgcccacactaggtccccgctccctcccacttacctcagacctttctctccattgcccagccaaatccctgctcccagctgctttactaaagagcaagttcctgggcatctctgtgtttctctttatggggttcaaaacctttcaaggacctctctccatgccactggttccttggaccctatcactgggctgcctcctgagcccctcagtcctaccacagtctactgacttttcctattcagctgtgagcattcaaccctgtcccctggaccttgacacctggctccccaaccctgtcccaggaaacccagattccaccagacacttccttcttccccccgaggctatctggcctgagacaacaaatgctgcctcccaccctgagtctggcactgggactttcagaactcctccttccctgactctttgccccagacccgtcattcaatggctagctttttccatgggaaaaacacgagcacccccaaccacaacggccagttctctgattccctaaatccgcacccttttcaaaacctcaaaaacaaaacaaaacaaaacaaagcaagaaacaactcaggcagaactgtttgcttaaccttggacatggtaaaccatccaaaaccttcctctcccagcaactaaacctctccactgggcacttatccttggtttctggaacctcttattctcttagaacccacagctgccaccacagtgtcccttctcccagtgtaagaccccaaatcactccaaatgacccaacccccaacccgatgcctgcttcagatgtttcccatgtcccctactctgatctctggggtcagctccgttctcagagcatgaagcctcccgacctggtccagccaccaacccgctaacgcagggaatagctacagaattgccagccctcccaggaccccttgcttgtgtcctggactcccagtcctggtcctctgcccccatgtctcttcaaacccacagctcagctccctcccctatccaattcttttgggtctgatccccctgacccagcaccccctccgcaggtgccgtgcccctcatccagtctcggattgtgggaggctgggagtgtgagaagcattcccaaccctggcaggtggctgtgtacagtcatggatgggcacactgtgggggtgtcctggtgcacccccagtgggtgctcacagctgcccattgcctaaagaagtaagtaggaccctgggatctggggagggaatggctgtgtcccacaggaataacagcgggatgcttcccccagggtcacttctcaggtgaggcttcagactaaaggagagagggaaggtcctggcccaggtcgcacccggaggcagagctggggctggaccactctccccatggctgcctgggtttctctctgtgtctgatctcgctgtgtctcttggtatctggctctggttgtgtctgtatgactgtgttttggtctctatgtccctctctcttttctgtctccctgtgtctgtgtctcccccgtctctgtctctgggtctctctgtggccatctctgtcaccgtgtgtctcaccctgcatctctttgcctgtctttctctctgggtctctgcctcagcccttcctcatcactactgaacacaccccgtgagggtgggtggggagcacccagaaaaaggaaggactttaagctcaatgtgtgtgcatgtgagggggtgcctgtcattgcacagcactctctgcaggacatccctccaccctggggagacacagggagggctggtttcagctgtagctgggtgcacaattgaggagggaggaaggagaaggggaaacaagaaaggaggggaaggtggccgggcacggtggcccacgcctgtaatcccagcactttgggaggccgaggtgggtggatcatctgaggtcaggagtttgaaaccagcctggccaacatggcaaaaccccgtctctactaaaaatacaaaaagtagccaggcgtggtgctgcgcgcctgtaatcccaattactagggaggctgaggcaggagaatcgcttgaacccgggagggagaggttgcagtgagccgagatcgtgccactgcactccagcctgggtgacagagcaagactccatctcagaaaaaacaaacaaacaaacaaacaacaaaaaaaatcgaaaggaggggaagggagctggagagagaaagggggacgtggccctgagctgtgggccgggccacccgccactacagagccctcactccagccccagctgcaggtgagccaccctcatgcctctcctcctccccctgctactccacactcctcagatgcccccgtggcctccctcctttttctctcccacactgtatcacccctggcttcctctctgctgtttctccttctctctctgacttcccgcatccttttctcatttgtctatttctcactcccttcctggttctgttctttctcccttcctcttccccatgtctatttcttgctgtctctgtctcttctttgctcatcctaattctcactgttctcccttctgtttttgtcattcctctgccattttatgctctctcttttccacttcgtttctttcagtttctgtctctgcctctcacatgatcacactcctgttttctaactcactgtctgtatttcaccacgactatatctccccgacccctgtgcttttctcactgtttctttttcttccctttggagtctcccttatcctcccctgccccatctacctttccccattttctctctcctcatgcatccacccccttcctccccaggaatagccaggtctggctgggtcggcacaacctgtttgagcctgaagacacaggccagagggtccctgtcagccacagcttcccacacccgctctacaatatgagccttctgaagcatcaaagccttagaccagatgaagactccagccatgacctcatgctgctccgcctgtcagagcctgccaagatcacagatgttgtgaaggtcctgggcctgcccacccaggagccagcactggggaccacctgctacgcctcaggctggggcagcatcgaaccagaggagtgtacgcctgggccagatggtgtagctgggagcccagatgcctgggtctgagggaagtggggccaaagaaccaggtggggtccggccacagcccagtttttctctgacccatagtcttgcgccccaggagtcttcagtgtgtgagcctccatctcctgtccaatgacatgtgtgctagagcttactctgagaaggtgacagagttcatgttgtgtgctgggctctggacaggtggtaaagacacttgtggggtgagtcatccctactcccaacatctggaggggaaaggtgagtgaagaccctaattctgggctgcaatctgaaagctaaccagacatctgcctcccctgctccccagctatagccacgccccctccccatgcctcatctgccgccctccttcccccttccctgactccctcaacacaagaggtgattctcacagcataattcacccattcctgtgttgagcacatgcttactgggcacctgctacgtgaccagcattgccgtagaccctgggaagcagcagtgaacaggtagagagcagcctctccctcctgcagcccccatgctggtgaggggcactggcaggaacagtggacccaacatggaaatgctggagggtgtcaggaagtgatcgggctctggggcagggaggaggggtggggagtgtcactgggaggggacatcctgcagaaggtaggagtgagcaaacacccgctgcaggggaggggagagccctgcggcacctgggggagcagagggagcagcacctgcccaggcctgggaggaggggccgggagggcgtgaggaggagcgagggggctgcatggctggagtgagggatcaggggcagggcgcgagatggcctcacacagggaagagagggcccctcctgcagggcctcacctgggccacaggaggacactgcttttcctctgaggagtcaggagctgtggatggtgctggacagaagaaggacagggcctggctcaggtgtccagaggctgtcgctggcttccctttgggatcagactgcagggagggagggcggcagggttgtggggggagtgacgatgaggatgacctgggggtggctccaggccttgcccctgcctgggccctcacccagcctccctcacagtctcctggccctcagtctctcccctccactccatcctccatctggcctcagtgggtcattctgatcactgaactgaccatacccagccctgcccacggccctccatggctccccaatgccctggagaggggacatctagtcagagagtagtcctgaagaggtggcctctgcgatgtgcctgtgggggcagcatcctgcagatggtcccggccctcatcctgctgacctgtctgcagggactgtcctcctggaccttgccccttgtgcaggagctggaccctgaagtcccctccccataggccaagactggagccttgttccctctgttggactccctgcccatattcttgtgggagtgggttctggagacatttctgtctgttcctgagagctgggaattgctctcagtcatctgcctgcgcggttctgagagatggagttgcctaggcagttattggggccaatctttctcactgtgtctctcctcctttacccttagggtgattctgggggtccacttgtctgtaatggtgtgcttcaaggtatcacatcatggggccctgagccatgtgccctgcctgaaaagcctgctgtgtacaccaaggtggtgcattaccggaagtggatcaaggacaccatcgcagccaacccctgagtgcccctgtcccacccctacctctagtaaatttaagtccacctcacgttctggcatcacttggcctttctggatgctggacacctgaagcttggaactcacctggccgaagctcgagcctcctgagtcctactgacctgtgctttctggtgtggagtccagggctgctaggaaaaggaatgggcagacacaggtgtatgccaatgtttctgaaatgggtataatttcgtcctctccttcggaacactggctgtctctgaagacttctcgctcagtttcagtgaggacacacacaaagacgtgggtgaccatgttgtttgtggggtgcagagatgggaggggtggggcccaccctggaagagtggacagtgacacaaggtggacactctctacagatcactgaggataagctggagccacaatgcatgaggcacacacacagcaaggatgacgctgtaaacatagcccacgctgtcctgggggcactgggaagcctagataaggccgtgagcagaaagaaggggaggatcctcctatgttgttgaaggagggactagggggagaaactgaaagctgattaattacaggaggtttgttcaggtcccccaaaccaccgtcagatttgatgatttcctagcaggacttacagaaataaagagctatcatgctgtggtttattatggtttgttacattgataggatacatactgaaatcagcaaacaaaacagatgtatagattagagtgtggagaaaacagaggaaaacttgcagttacgaagactggcaacttggctttactaagttttcagactggcaggaagtcaaacctattaggctgaggaccttgtggagtgtagctgatccagctgatagaggaactagccaggtgggggcctttccctttggatggggggcatatctgacagttattctctccaagtggagacttacggacagcatataattctccctgcaaggatgtatgataatatgtacaaagtaattccaactgaggaagctcacctgatccttagtgtccagggtttttactgggggtctgtaggacgagtatggagtacttgaataattgacctgaagtcctcagacctgaggttccctagagttcaaacagatacagcatggtccagagtcccagatgtacaaaaacagggattcatcacaaatcccatctttagcatgaagggtctggcatggcccaaggccccaagtatatcaaggcacttgggcagaacatgccaaggaatcaaatgtcatctcccaggagttattcaagggtgagccctttacttgggatgtacaggctttgagcagtgcagggctgctgagtcaaccttttattgtacaggggatgagggaaagggagaggatgaggaagcccccctggggatttggtttggtcttgtgatcaggtggtctatggggctatccctacaaagaagaatccagaaataggggcacattgaggaatgatactgagcccaaagagcattcaatcattgttttatttgccttcttttcacaccattggtgagggagggattaccaccctggggttatgaagatggttgaacaccccacacatagcaccggagatatgagatcaacagtttcttagccatagagattcacagcccagagcaggaggacgctgcacaccatgcaggatgacatgggggatgcgctcgggattggtgtgaagaagcaaggactgttagaggcaggctttatagtaacaagacggtggggcaaactctgatttccgtgggggaatgtcatggtcttgctttactaagttttgagactggcaggtagtgaaactcattaggctgagaaccttgtggaatgcagctgacccagctgatagaggaagtagccaggtgggagcctttcccagtgggtgtgggacatatctggcaagattttgtggcactcctggttacagatactggggcagcaaataaaactgaatcttgttttcagaccttatactgtgtaattgtaagtggacatttagtaatgtacagggggtcagggaaagacgggggatagtgaatgcacctgtgggactggtttggttttgtgattgagtaacccatggagttatctctgcaatgatgaattgtttgaaagaaacctgattgattttatactgaattagaagttaataagcatgctgaaaaataagagaacatattaggaatattgagcaagactaacatacataaaatatgagaaaaaggtaggaaatattaggtgggaaaaatatgataattggaaaaagtaaaaaaaatggattaatagaattgagtagaggtgaagaacgcaatagtgacattttagactagattgaagaaaaatgtcaaagaaatactgaatgatgtgagtgctggcagtgcagatactgaacactaaagactcaggaagagagaaaaataggaaaggaggaaacacatgactaaacactgaaggcaggttttttttttttttttttttttcgcagagtttcactcttatcgcccaggctggagtgcaatggctcagtctcggctcactgcaacccctgcctcccagttcaagtgattctcctgcttcagcctccccagtagctgggattacaggtgcacaccaccacacctggctaattttgcatttttaatagagacggggcttctccatgttggtcaggctggtcacgagctcctgacctcaggtgatccgcctgccttggcctcccaaagtgctgggattgattacaggcgtgagccaccgcacccagcctgaaggtaagttttatagaatttaaaatatctgaacgacctcagatcaatagaatccatagagtgtgattgagtagaaagaaggaaaggctatgaaacaaaaaagaaaactagtattgtcattgacaaaaaatgtcattgacaaagccctggagagaaaggatggcggaaatattgaaggaaaagaatgtagaactagaatataaattcattccaacagtttggcagtgtgtatcaatagccttttttagacaatgcaacattctcatacattgcttaagggagtataaattggtatactcattttagaaaatgatttagaagtatatgttgcagctgaacatatgcatgacctatcagtatcaatcttagaaatataccccctagaaaccctagaaatacttcatattttcataaaaatcctcgtaccagaaagttcatagcatcctcaaaccagaaactgcccaaaatgtttatctataggagaatggagaaataaatggcatattcataccaatgaatagtgtgtgtaatgaacaaggattatgtttcatccaagacagagatggggctttaaagagactgccacaggaacacaaagagaaaaccagagacggagagacagcaggggaaacagaatctgagatagacaatgacaaaatgggaagagaaaaaacaaggtagctggagacacacagagagacacagacaaacaggaagacagtatcccctcgtggttaacatcacagcttctgtttattaagcacctaatgtgttacaactgcacagatcccattgaaccatgggccctctccctcacctccccaaggaggcagcatgcaggagctcaactaggcagagaatccaggagtcctgaggtggttgcatgaatggacagcatacactaaatgaagaaatgctagacctgccctggtgtactgagcatgagggatttaaaggctttgggtaatgggaacacgatcatacattcatcattgtgacctgcacacccaccctgggaggctccagagggcgcacctttcactacaacaggagaaatgaatttgtgaggggagtaccagcatccttgaagagctatatgatccctcacctctgtaggtcagaaattatgtgggaatggctgacactgaagcaggaaatctcaattcagtgaggataactggataccaagatggttgaggccaagtgacgctaatttcacctaaacatcggcatggttagtacaatagacagcacagtcaacacagtaatcatgatagtctgacttcggagaactatggtgctggctagttgatcacagtgttcctggaagagaaatagattggaaaagactaaattatttctatgtaatcagaagacttcttgggtccagtgaacagaagtataatttgaatcataaaagcaaagaatcctggcccatcgttcaattcataaacttgagtcagttaccagatgttttggagattattggacactgattcttaactgacactaattacaagagacccaaaacaccactgtagtccaacaatcagtgtggcgcctggtggaggtcaggagttgtggccaaggcccatctcacaatgggtcccgtgggtctctgaacctacccttccggtatttcaccaattacagaataatgcataactgggacaggcatgctgagaaagtgacagaatttccacatgggcttccagacctgtggatgagggatgttacaccagacaagtccaggtggaagtcgctaggacttagccccatctaggctagccccacctagccccatctaggagggatcaggggttacaccaagctccggtccttcctttatcatgtggctgcacccagctgaatcccgtcgtatctccacacctagggaaatcataaaccaaaagcaagtctgcgttcctgcagggattacagaggttggtgacactgtcaatgattgaaggacgcaggagtggtggttcccactacatccacatccagttcacctatttggcccatgctgaaaacagacagatcttcggggatgatagtgagttatcctaagtataaccaggcagtgaatttcattacagctcttcatgtggcttcattgtttgagcaaataacacatctcctggtacctcatatgcagctattgacctggttaatgttttgtttcacctcaatatcttaataaaggcaaccagcagcagttcgttctctactgacaaggctttattatccatgaatatcctcttggtgtctcagtgatgatgcatccactgtcatttctgatcttactaacatgtatcttctgtttttttttttgtctttgttatcctggctacagaattatcaattttattgatcttttaaaagaaacagttgttttagttgattttctctataggttgtttttaatttcgccaatttctgccataatttttattatttattttcttaggtttgcattaggcttaaattgctctctgagtccatgggaggttggactggaagctgggattcagagtgggagtctgggagtgggtccagatagagggtgtggctggaggtgagttctttgggactggagaagatctaggggctaggtgggatgtggctagcgtctgatgggctgtggggcacccaggggtctgacctggtgtctgagggaacaatagatcatcggagatgtgagatatgaaaacgaagaggaagaacatgttgggcaggagaaaacacaagggtggtaaaaggaagtttttttacatagctgttgggatgaatttgtatctggagagattcaggtggggccaggaaggttcagctttgtcctggtttacactccccacaaaggagggatcaggggttacaccaagccccggtccttcctttatcatgtggctgcacccagctgaatcccgtcctatctccatctccagttgtgcaggtgcaacctcagtgcccacgtgtttgtcaagaactctgaggggctgacattttaccaacttagagacaaaaaagttggcctgccacaccttcacgggtattggcagaacacaccagaacctggccagagacaaaggacttgattacttgacacagcaggcagcgtgaggttcatgttcatatgggttcatcttgcccgagtcctatagggtgaccagagcagtccaggtggattttgcactcaaagtggtttatgccactgcagagggtcctgagtttcagaatcctcagtcttataagtgggcactagcaaacctgcccagcatttgccttttgctttttaaagagacaatgtctcactctctcccaggttggaagggagtggtgggatcatagtccactgcagcctcaaactcctagactcaagcagttctcccacctcagccttatgagtagctgggactacaggcttgcaccaccacacctggctaatgtatgtaggtatgtatatacttattttgtagagagggagtcttgcattgatgcctaggctggtcttgaactcctgacttccaccgatcctcccacctcagccttgaatctttgtctttggtggtgatattatttttattaccctgaaccacaaacagaattgctgcacaggggcatattatatttattgtcctggacagtaaactagtccattctgggaagacattatttttattatcctggacagtcagcaaacctgctctgatggagataccaacttgaaagactgcttgttagccagacatccttgatagatattatcgagtaagataatgttagtacctttgctcaaaatacatatagaaatgtaagagactcgtggaaatttgtcactcactactcagctcctggcctccacccttctctgctggagagccccccctttcttcccttccacctctcactcactgcacgttcctccagttctcccagtgttctgggccctgtttatgcccatggtagatataacaacagtaattcaatcgggatgagcaaaccctgccctactcttcggtgcatatgtgtgtgtgactttgactttgaaggtcctttgactttgaaatgtctctgtttggtatctgtgcatagtgaagctctgtgtgtgcatgtacatgggtggtgggagtgtgaggctctgtctgtccactacctgcccatatgtgtgcatttgtcctcaaatgcaaaacctgatgagtcaccttcaataccaagtatctctgatgtgggcactgatccagacgtagattatttcctttcctggctgcctgtgtctctagctacacctttgaccttgaatggccaaccgtgtgtctgggtactaccctggcatctgctctagtgggtccatatccgaatgcctggcctctgggactgcgcctgcaactttgaatcaccgcacactggcttctgcatgaatcgcagtgttgaccttgactgtcatatccggtcctgtgattatgtctgaattacttcggccatatttgtttctcaaatctgaatatccacagatgctatgtatctcccacccatctaacctttacagcaacctccaatttacagacgaaatggaggcacagtgagatcaaagaattttctcaaagtctcaaagctgatatttttgaatgcaggtggtcagactctggatataaccaccatactcatgtctgtgaatcagtgtctgggactctgagtgcatatccctgtctcttccctttgtaatcttattaaagacccaaccttgtacatccagaccctgtgtgcaagtgtgtacccacgtgaccttgcacacccagagccacactggaggttatgaatttaggtttgagctcttatgtccaaatctgtgtctatgaatgtgtatgtgtgtgcttacacccatgcctgtccatatttatatgcacatgtgatcacttgggctcttattatataagccacacgtacatgcatatgaatttctgcttaaggcacacagtctatatatgtatccaagcctggaaaccatcttgtgcctgtatgtatgtccatgaccttgtgtggtcacatatgtgtccttccctggcatgctgagtttggcttagatctccagattctgaggccaagaatgctaccgtacaaattgaatggacacgtctgtttgaggtctctgacatatgaaagcaaccgtctgtctaaacctgtatccagtgaacctgtctccatctccaatcacagagggaattttgccctctggtccttcatttcccttctgtctgtctctctctggctctcaggaacctatcacatgtaggataggagatgaaaggagaagttctggaaaaacaggctgcagctgtaaaacctaaagagaggagagtgcttcaaaaataacagaggctgggcacagtggctcactcctgtaatcccagcattctgggaggccaaggcaggcggatcacgaggtcaggagatcgagaccatcctggctaacatggtgaaacccggtctgtactaaaaaaacaaaaaacaaaaaacaaaaaacgaaaaacattagctgggcgtggtggcatgcgcctgtactcccagctactcgggaggctgaggcaggagaatcgcttgaacctgggaggcagaggttgtagtgagccgagattgcaccactgcactccagcctgggcaacagagcaagactgtctcaaaaacaaaacaaaacaaaacaaaaaagcaaacaaaactaactcccccaaaaaccaaagacttccggataaattgtgggaaaagcatatgtgaatggttttcacatatgtaggtactgtagggcactgggaagggtggccacataggaagaagtctctgttctcagggatcctctattcctttccgcagaggctcaggatggcaatggggaggtgtggggaggggtgagagagactcgagagagagagagagatgggcagagagatggggactgagatacacaatgacagagatggccgagagagagagatgggcagagagatgggggctgagatacacaatgacagagatggccaagagagatgcagagaaaaacagagacggggagacacagagacaagagacagagaagagagagggagatcaaggccgaaacacagccacacagacacagcagagccatataccaagagacacagagagactagatggacagatatacggtgagagaccaaggcagcccccaggaaggtggtccccaatgcctgttcatgcaacctgaaccagaaccttccctgtctctctccctctgtccccagcctcatctgaggggaaatgcccaactgttattcctgtggggcacagacacccctccccagaccccaggtccccactcaccgggtgatgcagtgagcagtagtgagcacccagtgaggatgcagcaggacgtccttgcactggaagttgccgaaatggtacaaccctgccagggttgggaaagcttctcacactcccagcctcccacagtctgggactggatggcaatcacagcatctgcagagggagtgctgggtcagggagggcaggcttggcaggagggcccagggactgggctaagagagggagctgggctgtgggtttgaagggggcagaggaccagggctggggatccagggacacaggagggcctgagattctggaccattccttggggtttgggttggtggctgttcctggtggggagactttgctctgagagcagggcaaaccccagggattagggtaggagacatgagattgcctggagcaggcattgggttgggagcaaagtatgtggggtgatttggggtcttgtctaggaggctgtggtggggagatgaaggacagagtgcttgtgggtttatgagcttcttgagtctgggatgtcctgctcctatggacaggggacattttcccaagttagcagttttttcagccaaattacctaatatgatgctacacccagatcagggtggcaggagaagagtcaggaatggggacctagggacagacacctgatccagtccccaaggcttctcctcttcctggtcagcactctctgaagacagtgggtctcttctctactggttccatgtctctgccattagctcagattccatcttcttgtccttgtctttccgtctccatctctgtctgtctctttgcatgtgtatatttgtgtgtgtgtatcttattttttttctgtttctctaaaaatcctgtctgagagaaactttactagttgttctagaggaaggaagtcttaaggatgagctttctgaattagttctggcatttctagtgtttggaattggttctgtaatgcgaataaattaaaggcaccacaactctattttcagtaatacaaacagaaataaaagtccgtggtgtaatgtggcaatagagatatgcaaaataacaccactggatattccgaatcaaataaaggagaaatgaccagggtgatcatgtatatgacactttagaatattttttaaagtaacaagcataatgaaattggatgattgcttctagttgtgttggcaaaagtggaaaaagaaaagaatgagcacaggactttaaatttccagatctcagactgaagaaataatctaaagttgctatgtctatgatgttgaaagaaacctttatctcctgtagccacagagctgagatttctgaaaatcaaacctagaatcttattgtgtgagtggctgaattacagtgctaattaaatcctcagcatgcatgctgtctgccattaaagtgaaggcataattgaaagggtagggatcccaaaagttggaatgaagacatgtgggaagactctgattatggtcaggagactggggaaagggtctagttagaggatgtggcctgaggctttaaaaatgaagatccaggggacagatagaatgtggccagtgtctggcaggatgtggggcacttggcatctatcctggtgcctgaggaagcagtgaactctcccaagagggagaacccaagaggaagagcatgttggggaggaggagagacaaatggcgaaaggaaatttattatgccaaaggtgggatgaatttgtatctggaaggatccagctagagccaagaaggttcagcttcagcttggcttacactatccccagaaaagttcaactcagccttgttccctcttctgttattttgctgtgcccagctggggcccctcctaactccaagggccaagaaagttcaacttcagcttggcttacactgccctcaaaaaagttcaacctagccttggtccctcttctgtcatgtggctgtgcccagctggggcccctcctacctcccacccttccatctccagctggacaggtgcagccttagtgcccaactgtttgtcaaaaactctgaaggggctgatattttgccaactggcaaacaaataagttagcctgccacagttttatggatactggcagaacacactggattctggatcaaaggcaaaggactttattactcacagcacagaagacagcatgagctttgtgttcacatcagttcgccttgaccctaagtcccacaggaatgatcagagaagtttaggaggatcctgtgacacgatgctttgacccacagctgagaaacctgagcttaggaatcctgaatcgtatgaagggactattaatatttgtccgagagggagacacattcttcgttatcccgaccacaaacagacctgctctggaggaacatactatatttattgtactgaacactaaacaaatctgctttaagggacacattattacactggtcggtaagcaaagctgttttgttgaaaataccatttgcaagatggcttgctagccaaacatccttgatagtccaaagcaatttttttttcactttgaagccatgtagaaacatgagaggcccatggagaattttctctcagaatcataatttaaattctctaaccttccctgcaaaacaaacttatactttcttccttataccccttgtctgccacatctgttaccctagcctcaccagtgtgccaggcccagttcccaaagatggcaggaaaaatatggggatctgatctggatgtgccctattgttgctgtctgtttatgtgtggatttgactttgaggggacatatccacgtttcccagtgtagaggctcagggtcttctgactgtgaaaagtccttgtttggtacttgtgcgtagtgcagttctgtgtgcgtgtgtgtgtgttgtgtgtgtgtgtatgtgcatgcacatgtgtatgtggtgggtgtgcaaggccctgctgtccactacctgcccacacatgtgagccatgtccccatatgggaaaactgatgagtaaccttcaacaccaagtgtctgacttggggggtgatctagagacagataaatctttcctgtcccagctgcctgtgtctccagaatatgtctttccccataaatgcccaactctgtgtctgggagtagccaggaatctaacctatgaagctgtatttgaatgtctggcccttggggttggtgtctgcaactctgaatcaccactaagtggttttatggatgaatcacagtattagctttgactaactttatctgggtctgcacatatgtctgattttggctatatttgttttcaaaatctgaacgtgcacacgtatgtaccataactaagtcatgtgtccttgattaaaataactgatatttattactatgcattacagttactgtgtgccaggcattatcatgcacacccacacacaggcatacacacaaagacacatttttctatttaagtcttaaggaaacccccatgaacaaatgaggaaatggaaagacattgaggtcaaataattttctcaaagattcagaaataatatgtttgatcccaggtggtcatacttttggatacaaccaccatactatagacccatgtctgtgaattgcttttggaggggctactcaggatatgtcccctcaaagtcaaacccaacactgcatatcagtgtctctctcctgtgtacctttactaaggcccccaccttgtacgttcagaccttgtgtgcaagtgtgtgcaactggaacactgggtatccagacctacagtggagtgtagattttggtccaagcttctatgtccaaagctctgtgtgtgtgtgtgtgtgcgcgtgtgtgcgcgtgtgtatgcacacatacacctatgtcttttttttttgagacagagttttgctcttgttgcccaggctgaagtgcaatggcatgatcttggctcaagtcaacctctgcctccctggttcaagctattctcctgtgtcagcctcccgagtagctgggattacaggcatgtgccaccatgcctggctaattttgtatttttagtagagaaggggtttctccatgttggtcaggctggtcttgaactcccaatctgaggtcatccacccacgttggcctcccaaagtactggcattacaggcgtgagccactgtgcctagccacacccatgtcttaactgtccacacttacatacaaatatcaatgtccatatagtgaccctcgaagctgagatctatttatatgttacgtgaaggtaagctgtaaatgctgtacctaccaatacctaagtttgaaagtctggttgtgcatatatgtaggtccacaatctagtatggccacatctgtgcccttgtatgaccctgagtttggccgagatacccaaactctgggaccaaatttgtgtgtcatacatactgagtgtcacatccatttaatatctgtgacagatgaatgagcctgaatgactggctccaagtgaccacttgtctgaactcactgtatccagtgaccttatcttcatccccaaccacagagaacttcttgccctctggtcttttcccctttctctctcttttgggaacctataacacatgagatgggtggtgggaacaaaaaaggatacagttccagggaaaagaggcaaaagttttttaaagctagagagaaaacagtattttaaaaacatatcagaggctcctggagaaactgaggggaaggcataagtgaagaatatgtaggtagataagggcacagtcagggaataggaggtgagaaggaccctgtcctcatggatcctctactcccatcccagaggcctaggacggtgactaggtcctgggaactgaggagtgtatgctctgctcccaatcttggcaagtgattttctttgaatgtggacattttaactgtggtccttcatgcactgtcccccgctgtgagctctctgaggcccactaccaaacctggtaagaaggcaggggtcagggtcctgaaaaacgtggctgggagtaggaacccatgggttctgtacctggagttggagaaggctgaaagccgggagtccaaggtcttggagaaggaaaatgttgggattctggactcctgtattttaatgggttggggagagagtccttgactcctctgaggacaaaagtactggagcttggggactacagcccaatgggtgtgtgcccacacattggaactcttagctatctgagaggcaggagtaggggccattggtaccagggcctcaggaggtggtaagtggaatttcagattatcacagggcttggggatcccagattgctaacatttgggtctttctgtctactccacactcagcttgtgggtaaccactggcctgctagctccctatagttgctgggccagcaggagcccgacgagcaggaactgcgcaagcgcgctggttctaaacagctgaagggcgtttggcgcatcttctgacatcatcagcactatgaggatcccggcgcaccactatggcgtcacttcggcgcaactagcccaccatcacccgtgcgcctctccagtcacatgtatcacatggcactgcccacgtctgcccccttgtgggtgtgtccaacatggtggctgacttaggctttgtgtccatagggaggagcctaggaccacagggaggcttgggtcacaagatgcttgagaaaagccagatgtgtccagtctatgaaacctgaaatacatggcttttgggaagaggggcagggtcctgaatgtatgggtccttctcaagttcacggtcttccctggtgggtctccttgataattgtattgtgccaacatcagcataatttcagacacatctggtaacatggactacccagggcacctgatggacaccttagtgtgtgcatgtttggagggcggaggcgcaaatgatcctaaaatcttgatcttggttactaatgttgttggctgttcccctaaactgcacatccagggcaaatgttgatttgttgcatcctagaccctgccctcagctacacccctgtctccaccacaatccatcccaacaccatcctcatccctaactttgtcaccatctcctgcccttgagagctgatgaaaaggaacgcccagaaaatggaacttacggccaggcgcggtggctcacgcctgtaattccagaactttgggaggccaaggcgggtggatcacctgaggtcaggagttcaagaccagcctggccaacatagtgaaaccccgtatctactaaaaatacaaaaattagctgggcatggtggtgcgcgcctgtactcccagcttcctggggaggctgaggctggagaatcacttgaacccaggaggcggaggttgcagtgagctgagatcacgtcactgcactccagcctgggcaacagagggagactctgtcaaaaaaaaaaaaaaaaaaaaaaaaaaaaaaaaaaaaaaaggaaagaaaacaggggatgtgtgcagaaaaccaggagatatagagtcaagaagcatcagaaaaaaggtcaaaacaaaaggtcaaaaagggcccccgccaacaacaacaaaaaagaaaatggaagtcacctgccaacattacctagttacccagaggctgagctgggattcacacccagggctgactaggtctttctcctgcatctcctccccttttcttggaacacctacgtctctcaggttatcctttccttccgaagcttccacagttggctcaaacccagggttctgagataacctagtctccctgactccatggaggctctgcttctcattcagacctagcaaaatcatctaaagctcactccaccaatattgagctcctagccagaccttacaccaaggtaagccctggcccatgctcaagccccacccctcctaaagtcttatccctgctcaagccctgcccctagcccaagccctttcctctgtgcaagcttctgaccaaggcgctgccctctgctcaagccccaccccttatcaggctccacccatcccaaagccgtaatcctgctcaaccccacccctgctcaactccacctgtgccccaggccctttgcacaaaaattagctgggcatgatggtgcacacctgtaatcacagctactctggtggctgaggcaggagaatcgcttgaacccaggatgtgaaagttgcagtgaaccgagagcatcatctctgaccaaggctctgccctcttcttaagccccatcatgcataaggccccatccctgctagcctgccacccctggcctgggactctccttcactcaaactctcctccagccagcgcttgcctcttagctggcgctctgccccagacccacccagcactcacttctggaggcagtgtgcagccgacagcacccactgtggatgctctaagatgccccagcgtcttaaagttttccactgacggtgctggctgcctgccagggctgcaagtgcagactgtattcctgttgccaccaatgaggactttgctggcactggagaaagtgcttgggaatggagtctgggatccttcagggggaatcacagctcctggggatggaatcaggacacaaagtggaggggttcagagtcgagggtcagggttaggattaggaaggtgtgggttgtattgaggggtgtgatggttaatatcaagcatcaacttgattggattgaaggatggaaagtactgttccctgggggtgtctgtgagggtgttgccaaaggagattaagattttacttagtggactgggaaaggcagacccaccctcaatctgggtgggcaccatctaatcagctgccagcgtggccagaataaaagcaggcagaagaacgtggaaagactagactggtttagcctcccaacttacacgttttcccctgctggatgcttcctgacctcgacattggaatccaagttcttcagctttgggacttggactggcatctttgctcctcagcttgccgacagcctattgtgagacctcaccttgtgatcatgtgagtcgcttatccttaataaactcccctttttatatacatcaatcctatgagttctgcccctctagagaatcctgactaatacaggggggaaaacatgggcagggtatccaggtctgctttttgggctggggcatgatgaggctaaaggacatgtcagttcttttttttttttttttttttttttggagacagagtcttgctctgtcacccaggctggagtgcagtggcgtgatctcggctcactgcaagctccgcctcccgggttcacgccattctcctgcctcagcctcctgagtagctgggactacaggcgcctgccaccatgcctgatgcctggctaagtttttgtatttttaatagagatgggatttcaccatgttagccaggatggtctccatctcctgaccttatgatccacccgccttggcctcccaaagtgctgggattacaggcttgagccaccgtgcccagccaggacatgtccgttctaaactccaggcccctggtctgtccctccgatacctcctcttacaccatcctcagacacacagtttcttttcttttcttttcttttcttttcttttctttgagatggagtctcactctgtcgcccaggctggagtgtggtggcgcagtcctggctcactgcaacctctacctcctgggttcaagcgattctcctgcttcagcctcctgagtagctgggactacaggtgcctgccatcgcacccagctaattttttgtatttttagtagagacagggcttcactgtgttagccaggattgtctcgctctcctgacctcatgatccacccacctcagcctccctaagtgctgggattacagggtctcccagctaataaatggcagggcagggctttgaacccaggcagggcaactccacagcctatttccttaaccactgtcccataaggcctcccaaggccccagtgagcagggcatgactaaacatgcagctacatgtcagaaccctggagtcaggctcagggacacaggaccaggtgacaggcacaggacacaacctcccatgtgacatcacgcttggctacacacactcttgcaaagctgcagggtgactcatacaatgtggtcacaccatgatacacacagcacatgacactgaaccagataggtacaaccacaaagatccagtcacatggtaaattacagtgatatcataatccagaaacagcctcggatgaatggaaatgcctattcaccccaatacacaaaaatcacacaagtacagccacacaagcacccccatacacacgtcatacgggcatgtaaacttagaagcaaccctgtctgcttgaagacggtgacactttgggacatacacatcacacacgcaaagccatggaccaaattgtgtccccccctctccagacttatatgtcaaagtgctaagccccaagatagtggcatttggggctgggacccttgggaggtgaggagggttagctgaggttgtgagggtggggccttcatgatgaaattaagtgccctaatatgaagaggaaaagagggagagagaattgaaacctgctaaacctcagacttggactttccggtctccagaatggtgagaaataaatttctgttgtggaagccacctgtctgtgttatgttgttatgggagccagagaagactaagacacacacacttacaccactctcccaccacacacacacaacacacacacctgtgacattgtggacgacatatcccaggagcctggtgcagggggtttctgctgtggtcatcaggttggcacctggtggggaggggattctgggattctttagccgtctcccttctccaccctcccacagaatctctgggcagcaacagccataagggatcctctccaccttaggcggtgagaccctgaaaccataacctagggcagaatttctcaacctggccgctactgacacttctgattgaatcattctttgttgtgggcactgccctgtgtgctgtaggatattacgcagcatccctgccctctgcccactagatgccagtagcaccctccttgccaagtcatagcaaccaaaaatgtcccactgtccagtggtctctgggagaagtcagtgttagcaacatctggaatgagagggagtgatggggagctggagagatggaaactcagagtgcaagaaaggcaaagaaagtcagtgacagaaacagagaaagttagatagggatagagacacagagacactgatacagagacaccaagatggaggctgggggagacagagtcagaaagctaggatggggaagatggaaacacaggcacaaagagttctcagggtcagtgagtctgaaaggtatggagacggaaatacaggtgttgacagcagacacagcctacagcctctgtgcccaggcattgttctaagcacttgacatgcagtaattcactttcataggaaccttacctggaagatttgattattagccccatttcacagagttaagtatcagagaggttaagtaacttgccgaaggtcacacagctatcagcagtttattccatttttactgctgaataggattccattgtatggatgcaccatggtttatctgtccactcgccagtttatggaacgtctgtcactgctttaacactgcaaacttccctctccccaatcttccttattatttaacttattatatatgatttgtactaatttacaatattatgttaacacatataaatgtatatctaatttgttatttattttattggatgtattttctattgtttgtatctttcagctacaacaagaacaaggatctttgccagttttgttcactggtttatccaaagcccctaaaaccctgcctagcacatagtaggtacctgataagtacttactgaataaatgagaatgaatggatggccacaaactctttctatcactgtatttctcagttgagcttctcggtcagggtactgcctctctggctgtttctgtctttgagacagacaactaacacacacacactctctctctctgtttatatctgtctctctgtggctgacactctctccatcactttttcctgtctctttcagtagatctctcactggagagatctcttagtctctagagggtggttggggtcttgtcaggggtctggggttgggaatctagagcagaggaatggagtttggaggctgggtctgaggtctggagtcaacctccagaatctccagtttgtgctgtggaatctagagcttggaatctgaattctgggattttggggtttggagtgaagcatctggaatctagacgagacatcagcaaactatttctgtagaagtccagaaagtaattatgttaggctttgtgggccagacagtctgtgctgtaattgctcatttctgctgtcccagcataaaagcagtcatagacaacacaagaaggaattaatgtatgttccaacaaaatgttatttacaaaaacacacagcagctggatttggcctgcaggggtgatttgtttacttctgattaaactggaacctggaaaatggaatccagaaatggaagtcttggttctagagtccaaagactggtctgatatctagagcttggaccacaagtctgatctccaggaagatgaagctcaaagtctagaatctgaatttggtgactgaggtcctcattttggagttaagatttttttatgtagatcacaagagactgtcacttcattgcagtacagtttagccctgaaattggggtttagccaaggagggttcttggcttcacttaggaaaggattcaagggtgctggtagtgtgagacagcaattttcgttgaatggtgctgctccttgcgaagcagggctaactcataggcaatgtgcccagagtcagccacctatgggctcttggcaactatatttatactcatgtaaatccactttcaattacatgcaaattaagtaatgggtcaatgtaaattgaggggtcatttatttagaactttctaggaaaagagcagtaacttccaggtcattggcatggaaaggagcagtaacttccgggtcactgccatggaaaggggaggtaacttctgggtcattgccatggaaaggggaagtaactttcaggtcattgccatgacagtttataaatgccatgacactggtgagggtgttctataccaatgagcaatgagagcagatagggatcacttttgtcttcatctggtcattcctgctggttttttttttttttttttttttttttttttttttaagatggagtcttgctctgtcgcccaggctggagtgcagtggcacaatctcggctcactgcgagctccacctcccgggtttacaccattctcctgcctcagcctcccgagtagctgggactacaggcgcctgccaccacgcctggctaattttttgttttttagtagagatggagtttcaccgtgttagctaggatggtctcgatctcctgacctcgtgatctacctgcctcggcttcccaaagtgctgggattacaggcgtgagccaccacacccagcctttttttttgtttttttgttttttttgaattttatcctgcctggacttgttttggtcagcagggttgtgaccagaaaacaagtcctgccagtctcctacctgacctttataaaacattgtctggataatcatgaaaagtcgtttggtctagttgtcagtataacacagagagagaggtcttcccttcctaccactggggactcctgcctgctccctgtgactcaacatgtttctacccaactaactgaggtctggcatcgtcctatggagttgacctgaactgtctgtcttttcttcagagcaaggagtgccgcaggggcccaggtgtcaccattttgttattataggcaacccctccaggctgcttgtagaaccatctaaggcaaaattactgatcaagttcatgtctatccaggtaaacctgagatgagtaaaatgacctgtccatccattcactaaggtcttatgaactgtccactcatcccctgaggtcctatgaatgtttttttcttttagagacagggtcttgctctgtcacccaggctggtgtgagcatagctcactggagccaagaactcctaggctcaagcagttctcctgcctcagcctcctgagtagctgaggctataggtgcacaccaccacacccagctaatttaaaaaaaattgtagacatggagtcttgctatattgcccaggctggtctcaaactcctggcctcaagcaatcctcttgcctcagcctccaaagtgctgcaatgcctggtgcctgtgaatttttttttttttttgagacaaagtcttactctgttgcccaggctggagtgcagtggtgccatcttggctcactgcaacctccacttcctgggttcaagtgattctcctgcctcagcctctctagtagctgggattacaggcacgtaccaccaggtctggctaatttttgtttttttaatagagacagggtttcgccatgttggccagactggtcttgaactcctgacctcaggtgaaccgcctgcctcggcctcccaaagtgggctaggtttagatttctatatgtagaaattgtatagataggttaatagtgttatggaaatttatgtcctcattcttttttattgtggtaaagtacacaaaatataaaatttacaattagtggcatttaggacactcacgatgtacaaccctaccagtattaatccagaacatttttattaccccaaaaggaagccttgtacacattagcaatcactccccactccccccgagccccagctcctggcaattgctaatctgctttctgtctctatggatttgcctattctgtatttcatataaatagaagcataattcagccacaagagatggaatggaataattcagccttttgtggctgaattatttcacttagcatcatgttttcaaagttcatccatgtttagtatttcattcctttttgtgactgaatattcattgtatgaatatgccagaaattacttatccaatttactagttttacctgttggattgattgtttccagttagatgctgttataaaaaaaaaagcttccatgaacatatatataggcgcacatatatagagtctaaatcattatatatatcctatatattgcagatatgcataagtttctttagtgcgtatactcaggagtgaaatttctgggcattagatatgcatatcttggccaggtgtggtggttcatgcctgtaatcctagcactttgggaggccgaggcaagcagatcacctgaggtcaggagttcaaggccagcctggccaacatggtgaaaccctgtctctattaaaaatacaaaaaattagccaggtgtggtggcagatgcctgtaatcccagctactcaggaggctgaggtatgagaatcgcttgaaccagggaggcagaggttgcagtgagccgagatcgtgcaactgcaatccagcctgggcaacaagagcgaaattccgtttcaaaaaaaaaaaaaaaaaaaagatatgcatatctttaccatttctacttgaggtcatggaaatatcctcctaaattatgtcctaaaagttacattgtcttgccttaatcaggtctaatctacttggaactgatttccgtgtgtggtgtaaggtaggagttcaatgccattttttttccatactgatacccaattttcccagcaatacctactgaaaagacattttctccactgctttgcagtgtgatttctgtttcacataaagtgcctataaatgcataggtctgcttctggctctgggttctattctattggtatgtttgtctatgtctgtgctaatatcacacttctcgtgataagttacaagtagaaaaggctaccctccttgcttttctttggaagtgtgctggctgacctttgcccttgccctttcttcttcataaattttagaaacagtctgtcaggctccagaaaaatcctgctgagattttggtttggaatacattgaattttaaaataaatttggagatatttctcctctttacaacattgagttttcccctccgtgcacatggaacaatatatctctccatttattttggtctttcttttctttctcccctcccctcccctcccctcccctcccctcccttcccctcccctaccctcccttcccctccccttcccttctcttctttcgagatggagtcttgctctgttgcccaggctggagtgcagtggtgcgatctcagctcactacaattgtcgcctcccgggttcaagggattctcctgtctcagcctcctgagcagctgggattacaggcgtgaactgctgcgcctggcctttggtcttctttaatatctctctatggtattggatatctttgaagacttatttttagggtcttcatggattttacattttttgattttttaaaattttgtggcagttacatagaaatgcagttgattttttattcatttgcttccaacaatcttgctaaatgatatgattatttctataattatttattgattatttgggactttctgcattcacaatcatatcaactaaaatgttttattattatttttttgagacagagtcttgctctgttgcccaggctggagtgcaatggcgtgatcttggctcactgcaacctccgcctcccaggttcatgtgattctcctgcctcagcctccagagtagctgggattacaggcacatgccaccatgcccagctaatttttgtatttttagtagagacggggtttcaccatgttggtcaggctggtctcaaactcctgacctcaggtgatctgcccacctcggcctaccaaagtgctgggattacaggtgtgagccaccacgcccggccagctctttttcttctataattatgtgcttatggctgcatgtttctctccgagcactgtagtaggcatacgcaatacatgtgtatacatctggtattttccttagcatttaattccaaatattttctaatttccattatatctcttgtttgaactctgggttctttagaggtgttcttttaaaatcaaaacgcacagtcctagatgagataactcagaaacagccagtcaaataccacatgttctgtcttataaatgggagctaaacagtgggtacagacaggcatagagtgaaataatagacactggagactccgaaaggtggaagcatgagagggggtgaggcgaaggaggaaaatgacctgttgggcacagtgcacactacttgggtgatgggtacagtaaaaagcccagagttcaccaccacacaacatatccctgtaagaaacctgcacttgcgggcggggcgcggtggctcacgcctgtaatcccagcactttgggaggctgaggtgggaggatcgcctgaggtcaggagatcgagaccatcctggctaacacggtgaaaccccgtctctaccaaaaatacaaaaaattagccgggcgaggtggcgggcgcctgtagtcccagctactcgcgaggctgaggcaggagaatggcgtaaacccggggggcggagcctgcagtgagcggagatcgtgccactgcactccagcctgggcgacagagccagagcgcgactccgcctcaaaaacaaaaaacaaaaaagtgcacttgcactccctaagaccattttgaaaacacatgaggattttctggttatcatgatttctagcttaattacattgtggtcagacaacatactctatatattccaacttggaaatttgttgagacttgcttcgtacctcagtaacaggttcacttttgtaaatgctatgtgtggtttttaaattgaggtaaagtttttattgaggtatgcacagtgtggcgttagagttcaatgagttttggcaaatgcatactcatgtaatcctcactcctgtaaagttatggaaaattcccatcacccgagaacgttcttttacccttattcccagtctgttttttttttttttacttttatttttgagatggagtctcactcttttgcccagactgctgtgcagtggtgtgatctcggctcactgcagcctctgcctcctgggttcaagcaagtctcccacctcagcctccagagtagctggaattacaggcccccaccaacacacccatctaatttttttttttttttttgagatggagtcttgctctgtcaccctggctcgagtgcagtggcgcgatcttggctcactgcaacctccacctcctgggttcaagtgattctcctgattcagcctcctgagtagctgggattacaggcacctgccactatgcctggctaattttggtatttttagtagagacggggtttcaccatgttggccaggctggtcttgaactcctgcccaccttgtcctcccaaagtgctgggattacaggtgagccaccgcacctgaccccaatctgtttctatacctattcccctctcccatcccagcaaccaggccacattgaataattttgcctgttctagaatttcatataaatataatcatatagtgtatcatattttgtgtctggcttctttcactcagaataatgattttgagatgcatgtatgttgttgcttatatcaatagtttatttctttctggtgcagagtagcaatccattgtatggatatatcacagttcgcttatccactcacttactgatagacatttgctgcatttccaatttcattattatgcatgaagctactataaacattcttagggaagtgttttctatggctattacctaaatacctaggagtagaattgctagccgtcatgtggatgtatgcctgtctttctaagaatctgccaagctgttttccaaaatggttgtagcattttaccccctacccccagcaatgtaggagagttacagctgctgtagatataaccaagacttgatgctgttattcttttcaattttagccattctggtagctgtatgtcttttgaaatgattctatatttttcagatactgggtgcaacattccatatatgaccattaaatagagtatgttaatcatactgttcaaattatctatatacttattcagtctcccatctccttgcccctcagttgccccattgtgcccctcaaacttccctctttctactccttggtctctgttgctgtcactcacagtagccctcgccacaattctccccactagactctagctgcagcagccaacttctgagacacatgcaaattaaaaattcttgaaatgcagttaagaagacaaaaatgaatatagatcaactaaagctgaatagttaaactaagcaagaaaatctctacggttaccatttgctgacctgacttttcagaaactggacaacatccatggcactggtttctcttaactatccagggaatggcccctccctctgaaactctgtggccctcctggtcaaagctcgcatttcccagatagggaaatgcgacccatggagggaaagccatttgctggaatctcttgaatggaaggggaagcaaggaggacactacaaacagaacctgcgcttctcttagactttatttctggatctaggggaaagggacaaaaaatgaaaaaccaactggtaaggttgggtcaacgtgccacaagggggcactgtgtacagggagagtctaggtggcattggaccgctgggtctgagggaggaggggctgggacctggacctctgggtctggggaaggaggggttgggggcctggacctctgagtctgagggaggaggggttgggggcctggacccctgggtctgagggaggaggggctggggggtctggactcctgggtctgagggaggaggggctggactcctgggtctgagggaggaggggctggggggtctggactcctgggtctgagggaggaggggctggactcctgggtctgagggaggaggggctggggggtctggactcctgggtctgagggaggaggggctggggatctgtacccttggtttgagggaggaggggctgggggcctggactcctgggcctgagggaggaggggctgggaacagatattcctgaattccttccgcaggatgtatttgggggtcaatttcatgggttcccagtccccagagttaactggcctggacggttttctctatccactcagtgaatttgcagaggttggtgtagacacctggcacgccaacttggccacacggggcttttccgaaagacacaaggccctgcaagtacccgttgcagatcaggggccccccagagtcaccctgttgtgaagagagggagagtcagaattcaaaacacagagaggtggaaatggatgtgggctcagaaaggaactaaatgagactgagaaacaaagacagaaccatcatcaataacaacatagcccagcaacatatctgttggaagtcccattccagatccctgacttcatctaatcctgcttcccgatgtcctatgtcctgaatgctggctgcttctcttgggcttgtggtctgtctgtttctgtttgtctgtctctcctttgtctcctttgtggcttgtttatctgtctcagtgtctctgcatctctttgtaaagtcttttttttttttttttttttgagacagagtcttactctgttgccccagctggagtatagtggtgtgatctcaactcacttcaacctctgcctcccatattcaagcaattcttctgcctcagcctcccaagtagctgggattacaggcgcctgccaccatatccagctaacttttgtatttttagtacagacaggatttcaccattttggccaggctggtcttgaactccttacctcaagtgatctgcctgcctcgcctcccaaagtgctgggattacaggcatgagccaccctgcccagcctctttgtagagtcttgatttttcctgtttctcttcgtgtttcacctctatgaatctgtgtcactgtttccctctgggtacacagttgacccttgaacaaccctggtttgaactgcacaagtccacttatacttggattttttcaataaacacattagaaaaattttaggagagttgcaacaatttaaaaaaattcacagacgaactgtgtagcttagaaatatcaaaaaattccaacaaaggtatatcatgaatgcataaaacgtatgcataaatcgactatttatgttattggtaaggctccccgtcaacagtaggctatttctagtcaggtttttggggagtcaaaagttataagaggattttctgttgggtggaggtcaccgccctcaggccccatgctgttggaaggtcaactgcatttctatgtgtgtgtgtttctgcctccccatgtctgtttctgtttctctcttcctttgcttctctttattcctgtgtttatttctctgtttctctcagtttctctctctagttgtcactgtctccctgtgtgtctctccatctctgcatctcgccatgcggccctgtgtgtctctgtctcccccttctccacccttccctgagtcgcctgccctcccctttcccctctctcacgttgcaggagtccttctggtcttgccctccgccggcgcagaacatgctggggtggtacagcgggtcatagagcttactgcagacctcctcagacaccaccgacacgttcacgcactgcagcacggtaggcattctgcctgggacgcagagctctgggtcagcccccgcgactgggcagaggacctccttgaagagggcagacacacacccgtgagctcaccgttcgccagcagaccccagccagaaacgaggcaagagttccccgcggtagggcactgcgaagcaatgctgatgctccggatggtgtcagactcggacacggattcgtccaacttgatgagcatgaggtcgttagcgagcaagggtctgttgtactctgggtgccgtacggagaggctggcctccaccatctggctccctggctcttggtcggcctcaagactgtgcaggcccagcccgatggtgtaggagctgtgggccacggagggcaggtcagttttgtggcaactacatccttacctccattctcatcttcaaccccattcccatccccatctcctaaccccaaccccaccctcttcgctaaacaccctaagagctacttaaccatggtctcaaatcctcattcacaaaaattcagggacaagaacttgccttagttcactagagactcagcactgggctgagatttcaagtcaggactctctgagtccttccgaagcaagattcccgcctcccagcccttccctctggggctccccggatccaggctcattccgtcctcctcccagagccttcaccgctgtttccccctgagcaccccaagatgagcctgatattaggccccgcccccggacccaggccctgcccactccccctacctctgcactcacttctggaaacagtgtgcggctgacagcacccactgcggatgcaccaggacgcccgagcagaacaattcgttttccatgaccagtgccgcctgccagggctgcgagtgcgggctgcagtcctcgccgtttatgatttggctgcagctaccagagacgagcgatcctgagggcggagtcagggatgggatcgggaccaggaggcgggcccagggttcctgggggtgggcttaccgagcaggggcgtggtcagaggttcaggagcagtcagggctcctcggggcggagtcagggctgggaacgggctcaggaggcgggcccagggctcttgggggaggggttaccgagcaggggcgtggtcagggcttcaggagcagtcaggactcttggggggccgagtcagggctgggggcgggcccagggggcggacccagggctcctgggggtggggttatggtgcaggggtcatgatcggagcttcaggggctggtccaggatataggcctagggctcccaggggcggtgatcacggtgcaggagcctggtcagggattcagggtagtcagggctcctgggaggagagtcagggcatgggggtgggctgagaaggcgggatcagtgctcctagggttggggttacagcgcaggggcgccatcaaggcttcaagagctgggttatggctagaggcagtctcagaaggtgggaccagggcttctggggcggagtcagggctctggggtgagctctggaggtgagactggtgccatcgcggtgcaaagccacggtcaggaggggttcaacagaggagtctaggctcatagcagtaggatcgggtccttcggggtgaattaaagctcagggggtggagttgttgctgggagcaaggatcgggtcacttgtctgcgcagactgatgctcaaagagtcggtcctgcgccgagtcactcctatcctctcccagccttgcccacagtcacaccaagccacaagcccatgcacaccaaaacaccgttttatagtcctgtgaggtgagttccttggggatgggagagggggatctcaggactgaagacccaggaagcaggcacagattcccagcaatggatcacgccccaggaagcacaatctcctgcaccctcggcttcccctgtccccatatcatcattacactgttgtcactccaccagatattcagaggcacaaactgtcagagtctcacaggtacaaccacacacccaggcacactgccacacacaaatttaccacgatacaaggagttgcaggggcacagccatgggggacggataacacggtaccgtctcacaggcagctttgcagtcacaagcaagaggacactgagtcacacctgaacattaacaaacactgtgcccccaagcacggacagacacacacacgcatactcagatacctgcgacaccaaggatgaggtaccccaggaaccagccccagggatttcctgctgtggccatcacgtcagcacctggggatgaggactgagacttagccgtgtctggggatcttcagcccaagtctctccatccctctctttgtccctccctttcttccctctgggacgttattaggtaggcaagagcctagaccatctaccccctctcccatccatggacccagaacctagagagacagatttagagactgagagagaaaaagagagagagagatgggaaaagagagagagagagagaactaggtagaaaggaaagtttagagaaagcatctagccatctgtgaatggggagagatggtgtctagccacccacaaacaagcatggagggaagacacacagagaatcagagccggagagacagagtgcttgagagatatcctcagagacagtctgagagttagacatggagatatagattcagagagacagagagacccctaactagagacagtgactcctaactagagacagtgagagatctgtctagagagatgtggagacagaaggcacagaggctgagaatccagcgacatggagctgtagggagagttggatcatgaacactgcaggcttttagtgggggaccaccaggcctcttacccggccacctctgggctcctggattccactgctgggctgagctccagcctgctgcctcccgcaggggcctccttggggcttataagcatcctcagcctgggctggcctgcccccaggggatgtgttccaggggtcaggtgctgcaaacttccagctcaactctctcaggctgcctcaactctgaccaggcagtggttgggggcccagaaggggctggcagcagggtctagggacccagggaggagacccctgcccagatcctagactccactctcctttttctttctctctctctctctcattctttctcttttcatgttcttattctctctcatgagatacctctctcttgcctgtatctctcattttctctttctcttcttctttctttctctcattctctctctcattatttttctcgtgttttctttcatttcctctcattctctcctgttctctctcatgttctttctctttttaaattaaatctctctctctctctcccctcctccttcatccctctctttctgtgcttctccagcaaatttccccaggttcgtatccagcctacatcacgaactatttttggaaccttgggcaagtgactgcacccctgtgagcctgtttttccaactgtaaaactggagtgaccattatgccccatttcccaagtggattcaaagaggtaattcagggaaaggcacacagtgccaggcacattgtaggctctcggtgagcgggagaactaaaaagtcttcgctcagtgaaaagcagctgagtgcctaccacactccgagctctgcggcaggtgctggggccacaggaggaaccagcaaagtcctcgtcactggggatcgcgtcctacccgggggcacagaccataaaggaaaactgcagggaccagcatataaggtggtggtcggggagactcagagaaggggaacatttaagctgagatcccagggaagaggaggaggagggtcgccgcagcaggggcggttgcggggtgcaggggagaacttggctccagccagaggagggcagggcgggtaggagggcagggcgggtaggagcgcagaccgggaaccgggcgggcctgcaggagtttacgtaccaggattaaggagcttgggttttacttaagtgcaatggattttaagcacgaggatggagtgacataatcttatttactttttaaaaacttccagcttggagagtgatggtgggggcggggcggggggcagtggcaacagcccaggtgggaggtgacggggtcaagggagaagagaggtgaatggacacggggtcccctctgcatgtggagccaagttactgcccgatggatggaaagtggggggccaggagcagaggggccaaggatggcgtggaggcttggtctgctggcttgcgctctacggatcttgtggagacgcataggtgcgggaaggggggtggggggtgagagggtgccgtagaccgcggagggtgcacggaggggcaggccgaggtcaggactgccgagaaacagcggggactcatcaggggagaggtggtgtttacagccacgaggccgggtgagatcatccaaggagtgggtgggtgtagaccgcggagccggcgcgggtgagggatagtgcccgcaggtgaccgcgacgaggcaggaatgtctctgtgtctctctgtctctcctgggtctctaacactctttccttctccttccttacttctttcccccacagcccaccccgtgtgtctgtctctctttctctctggctctcttttcctctgcctctctggtcccatctctgtctctctcccccttgtctctgtttctctcacctgccagactggaagcatcccaagtgagaccctcccccaactctgtcctgggcccgtgcgcccccagataactctgggcaggacgggacataggctgggaccacagaacaggaagccctggcaggtttctgtctctgtctctcttttccctgtccctgtccctttctctctctgatcccttctctctcgctctccctctgacctctgtctgtgaccctctgatctctgtctgtctctgtctgcccctgtgtgtctctctttcctcctgtctctgtctcaccttgccttctctctctgtctgtgtctctgcacctgtgtctgtccatctttctctgtgtctctctcctcccatctctgtctctgtctgtggctccgcacctgtctctgtccatctttctctgtgtctctctcctcccatctctgtctctgtctctctgtctgtctccgcacctgtctgtccatctttctctgtgtctctctcctcccatctctgtctctgtctctctgtctgtctctgcacctgtgtctgtccatctttctctgtgtctctctcctcccatctctgtctctgtctctctgtctgtgtctccgcacctgtgtgtctgtccatctttctctgtgtctctctctcctcccatctctgtctctgtctctctgtctgtgtctccgcacctgtgtctctgtccatctttctctgtgtctctctctcctcccatctctgtctctgtctctctgtctgtggcttcgcacctgtctctgtccatctttctctgtgtctctctctcctcccatctctgtctctgtctctctgtctgtgtctccgcacctgtgtgtctgtccatctttctctgtctctctctcctcccatctctgtctctgtctctctgtctgtctccgcacctgtctgtccatctttctctgtgtctctctcctcccatctctgtctctgtctctctgtctgtctctgcacctgtgtctgtccatctttctctgtgtctctctcctcccatctctgtctctgtctctctgtctgtgtctccgcacctgtgtgtctgtccatctttctctgtgtctctctcctcccatctctgtctctgtctctctgtctgtgtctccgcacctgtgtctctgtccatctttctctgtgtctctctctctcctcccatctctgtctctgtctctctgtctgtggcttcgcacatgtctctgtccatctttctctgtgtctctctctcctcccatctctgtctctgtctctctgtctgtgtctccgcacctgtgtgtctgtccatctttctctgtgtctctctcctcccatctctgtctctgtctctctgtctgtgtctccgcacctgtctctgtccatctttctctgtgtctctctcctcccatctctgtctctgtctctctgtctgtggctctgcacctttgtctctgtctatctttctctgtctccactttcctcctgtcttctctcatgttgctctgtctttgttttccatgcgcttccaacacttctcccttcgctctcttcattgtgtctcaactcaagtgttacttcttcagagcccttccctgagccctcccctagtctgattcagggtcttcactcccctatttgttttttcatcttatagcatcctacatgctcctttagagaatttggtacaatgtatacacgtattattatgtgtttctttttctttttttttcttttttgtttgtttgtttgtttctttgagatggagtctcactgtgttacccaggctggagtagagtggtgcgatctctgctcactgcaacctccgccccccgggttcaagcgattctcctgcctcagcctccccagtaactgggattataggtgcctgccaccaattctggctaatttttgtatttttagtagagatggggtttcaccatgttggctaggctggtctcaaactcctgacttcaggtgatccgcccaccttggcctcccaaagtgctgggattacaggcgagagccaccgcgcccgtcttgtgtgtttatttttctagtagctgtttctttcattagtgtgggagccccttggggacagggctggtgtctgttatgttcactgataaaaactattcactgcagatgtgttgagtggatggataaagggagatacaaaaatagagagagacagacaggagagggagagatgaaggctgacggagagagaaaataacaacagacaacaatggtagcttactattaattaacctttagaatatgttaaattaattgtaaggaggtcaagaacttaccttatgtctggccctcttctaagtattttaaatgcaataacaaatgtattcctcaaaaaaatctaagaagtagatgctgctatgaactttgtttgacagatggagaaactgaggcacagagagggtaagtagtttaccaaggtcacagaaagactgaggccaaaagagaagaacagacagaagtgggtagatggagagtaggagagagctgggaacacactgagagatgtggccaaaaagataggaagacgctgaaagagagacacgtctcaggaattaggaataatcatcactttaaaaataataaaatatcaggttgggcgcggtggctcacgcctgcaatcccagcactttgggaggctgaggcgggtggatcatctgaggtcaggagttcgagaccagcctggccaacatggcaaaaccccatctctactaaaaatacaaaaattacctgggcgtggtggtgggcccctgtaatcccagcaacttgggaggctgaggcaggagaattacttgaacccgggaggcagaggttgcagtgagtcgagatcgcgccattgcactccagcctaggtaacaagagtgaaactctgtctcagaaaacaaacaagtaataataataatgataaaatatctaacatttatctatcacctctcttctagttgtcatggtaacaattttatacaagttaactagttttaattttcataactccctgaggtactcatcattattcccaatgtgatgaaagaggaaatgaacgcacagagagggcaagctacttattgaagatcacacagcaaagcagccatgcacatgggctgcctgaccccagagcccatatcttgagctgttatgccacctctctctataagtcaggaaacagaagctgaagccaaaggacaggtgggccttcctgtagatacacaggtcatgggggcccaccctggcccactatccatcatctgagtcatctgagttcacccccacctgcggatgagatgcagcctcagccagagaagccagggagtattgctggggaggggagggaatgcggccacagacggggccacccgcccaccgagagagcccgctcttactgtataactggaagaacaagccccttctacctcccatccccctgggggctggctgagccacaagaggcatgaatctctggatgcagtggtgccgctgcactaaggccccgaggcagccccagccatctctgctgaggtgcccagagcagcccttagggaactgacccctgagttttcctcagtaacctcagggaactcctgtcggctggatttgaacaaacctcaagggtggaagaaggcatcactcttgctttttttttttttttttttttttttgagatggagtctcgctctgtcgcccaggctggagtccagtggtgggatctcggttcactgcaacctactcctcccaggttcaagcaattcccctgcctcagcctcccgaatagtggggattacaggcacacaccaccacacccggcccatccttgccttttattcaataacataaggctaccttggggcagattgtattacacaagaaaagtcttttccttccttagtatggacgataggatattcagtaggaagaaaactcaaaagtcctggtgtgagtggctccttttcctgctccggtctcaagaggagagaggctgggactgaatggtgcaatcctgggatctcctccagaagtggggaggaggatggagagacggactttgggagaaggaaagatggagctcactccagcatgagggaggtgcagggaggcagagagaacacagcctgtttgccagcaagatgggaggatggctgtgggctggggggaccactctggggaggatcttctagccactctgcagcagcaagtagaagaaccccagtaaataataaaggagggctgggcacagtggctaacgcctgtaatcccagcactttgggaggctgaggcagatggatcacttgagctcaggggttcgaggccagcctaggcaacatagcaagaccccgtcactactaaaaataaattagccaggcatagtggtgcacacctgtcgtcccagctactcaggaggctgaggcaggaggaggatcgcttgagcccaggagttcaaggctgccgtgagccaagatcacaccactgcactccagcctgtgagagcaaaaacaaacaaggctgggcatggtggctcatgcctgtaatcctagcactttgggaggccaaggcgggtagatcacctgaggtcaggagtttgagaccagcctggccaacatgttgaaaccccgtctttattaaaagtacaaaaaattagccgggcttggtggtgcgtgcctgtaatctcagctacttgggaggctgaggcacgagaatcacttgaacccaggaggtggagattgcagtaagccaagatcacgccactgcactccagcctagcgacagagtgagactgtctcacacacaaactcaccaaaaaaaaaaaaaaatatcaccccaaaaccccacaaaaaccaaaggagcagaagttatgatggtggcctcattaaccaagggcctgggcatcccccatttttctagcagcaaccaagctgagtcatcagacatcactctacagaagaaggaggatggatgggaccccaaagtagctgtgacatttcttgccaggcagatggggacaggggcagtgggcctggagcagactgaaatcaattaagatctaattgtgcaggccatagtgggcaggtgtggtcaagggactagcttttaaattttatttaggttttttttttttttttttagatggagtcttgccctgtcgcccaggttggagtgcggtggtataatctcgactcactgcaacctccacctcctggattcaagtgattctcctgcctcagcctcccgagtagctggaaatacaggcacacgcaaccacacctggctaatttttttgtacttttagtagagacggggtttcgccatgttggccaggctggtctcgaactcctgacctcaagtgatctgcccaccttggcctcccaaagtgctgggattacaggtgtgaaccctcgtgcctggccttatttagttttaattaatttaaatgtaaacacccacacctgattcagttattgggagagttttaattaagtatgtttggaacaacgtgggtgcgtgaatcatctttttcaactctaaactttctgggctctgaatgcagatcaaatatttctgaaaaaacttagcatccaaattgcaatgtgctgggagtgtaagtatatacactggatttcgaagaactggtgtggaataaagaatgtaaattctcttactgatttttttttacattggttacatgtggaaatgacaagtttggatatatcaagtttaatatgttactaagattaattttacctgtttctttttcctttttaaatttatttatttatttatttttgcagaaacagggtctcactagttgcttaggttggtcttgaactcctgggctcaagtgatgtgcctgcctcagcctcccaaaatgttgggattacaggcgtcaggcactgcacctggtccaggtttcttcttaaatgttccctcctgaccacctgtctagaatggctccatctctttaccctgattttattgttatcaagtatgtaagtctgtattcatttcatttcccattgctgccggagtaactaccacacgcttagtggcttaaaacaaaagagatgcattctcttacaattccagaggtcataagtccaaagtgtctaaagtgggctaaagtcaaagtgtcagtagaactgattccttctggaggcttcagaggaggctctgtttcacccttgtttccagctttaagatgtcacctgcctaccttggctggtggccgcatcctccatcttcaaagccaacagtcgcctgcatcatcctgacctccgcttcatgtactcaccctccttctctgactgactcttctgtctccctcttatgggtgatcaaggtgatctttgtgatcacctggagccccctcgggtaatccaggataatctcctcatctccagatcatccacttaatccatctgcaaagtctgttctgccacgtgaggtcacatatgcacggggtctggggattgggacatggacatctttggagagggggtattattctgtgtactcaaaaatcgcggcatattcagtgatttgctcgtttattgtgcctgcctctgctagaccataagctccatgaggaacaaaacatgaccctgtcagggtcaccattgtatccccaatgccagggacgatgcctggcacatagtagttgatcagtaaacattcactgaggactggcctggtgcggtggctcacgcctgtaatcccagcactttgggaggccaaagtgggcagatcatgaggtcaggagatcgagaccagcctggctgacacagtgaaaccccgtctctatcaaaaatacaaaaaattagccaggcttggtggtgggcacctgtagtcccagctactcaggaggctgaggcaggagaatggcgtaaacccgggaggcagagcttgcagtgagccgagatcgtgccactgcactccagcctgggcgacagagcgagactgtctcaacaaaacaaaacaaagcaaaacaaaaccattcactgaggacaaatgttccaaggacagaaaaattcatgctcttatgaacaagtgatttacagtaacagaaaccgttttgaaattggcattgcgttttacactgattaagagacggactctggaatacacacttgtcatagttcaaatctctgctctgccattcactagccgggcaaccttaggcaaatcgtactttctctgtgcctcgattccttatccgtgaaatggggatagttacagtagttgtctcatagaatgttagaaggattaaatgaattagtacatacaaggcagttagaactctgccaggcgcaaaggaagtgcttcataagcgttagctttcattgtcattgttaatattattctgcaaatatctgaaatgatatttaacaaaacatgatgcaaacccaagcataggggattcgtttgtagttccaaatagattaaacatctcagcaacactttggaagattcttattgtctccaccttgagctcaccatgaactcaaggagcgagagaatacagtccgtacaagttgtgaatcctgaaaatctgagacaggtctcagatttttcagaaagtttattttgccaaggttgatgacgtgtgcccgtgacacagcctcaggaggtcctgacgatgtgtgcccaaggtcagcagagcacagtttggtttcgtacattttaggaaggcatgagacatcaatcaacatatataaaatgaacattggtttggtctggaaaggtgggacaactcgagcggggagggggcttccgggtcaaaggtagataagagacaaacggttgcattcttctgagtttctgattagcctctccaaagaaggcaatcagctgtgcatttatttatttattattattattattattattattattattattatttgagatggagtcttgctctgttgcccagcctggattgcagtggcgtgatcttggctcactgcaacctccacctcccaggttcaagtgattctcctgcctcagcctcccgagtagctgggactacaggtgcccgccactaagcctagctaatttttttgtatttttaatagagacagggtttcaccatgtcagccaggatggtctcaatctcctgatcttgtgatctgcccgcctcagcctcccgaagtgctgggattacaggcgtgagccaccgcaccccggccagatatgcatttatctcagtgagtagagggtgggtttgaatagaatgggagtctggtgggctctaagcagtgcccagctggacttttccctttagcttagtaattttgggggccccaagatttatttttctttcacgaactcatttcaaaactgagtctggatttcattctcctagcttgacaaattcagctgccaaattgctgattaaaagcagatttccttcttaaaggggaaagccatggtttttttctgaaaggagaggagaaagccttatcgtttctgtttcataaaaggaaactttcatgaactgcttcctggctcctctggttatggagtgaaattcattgcaatttcttaggatctctacccgggccacccacagagggctcttgaacaacatgcaggctgcagacacatctggcctgtctcgtagagtctggacttttttgtttgcttgtttgtttgtttgaatggatcacgagcattaaaaggtcaagagattgcaagtttctcttgaaaaggccacggtatcagtcaatatcacgcctgcattcccacgtggccataatccagcatcagcaggtgctgagtggccaccccgggggcaccctgtggttttccttggcccacacacagtcagcttccctcatttatacttcctgcctggccccaggaggtggctgagtttgtgacctcggtggagaaaaaagcatggacacacagagacatggatataaagagatcagagggaaagaaagtcacaaataacgaaacaacaccacaaaaggagtcatccatcaccctgaccatgaacatcatcatcatagctactcttgtaacgtactttatcttgtgccaggcattattctaggctctttgtaaatgtgaactcatttaatctccatgaggtgggaactattatcaccctcactttatagatttaaacaaagagtcacagagaagctcccgggttgtttgcagaaaacagcgggcaggtgagagcgctgggctgggcactccccaagctcggagcaagtgcgcctacaactgtgcaatactgccacctagtggagccggagagacatactcggggaggactaaaggttgtgggcccagggttctcttgcgccagtcaccctgggccgcagcatccggctcaggatccagaaacgggagcagaggtggcaggaagcagggctggccgccaccagagctttccacctggggacaccaagtcatggtcctgactttgggtctctcagatgtaaagggaggggttcaagcgtgacatcaggcgagggctgagtgtctggcctcatggtcggctttcctcagctgaggatagcgacatcgcatgggtttatgtgaagtttcaatggggacgtccacacaacacgttggacacacaagagcccggcaaatggtatctccaattattgctatgaatacaatgaagtcacatggtgaccttggttgcccttcgccatctcccgctccgctgtgcacccatatagtcaaataacaaccatgcagataataataataattaacttctcacataattgagtggctatagtcattttttaaaaatagagacagggtctcactacgttgcccaggctggtcttcaactccaggcctcaaaccgtcctcccacctcggcctcccaagtgctgggattacaggtgagtcactgcacccagcagattctttaacttgagttgttgtacttaatattataggataaaatcataagcctgtcttaaaaaaaaaatggtgcagggccgggcatggtggctcatacctgtaatcccagcactttgggaggcagaggtgggcggatcacctgaggttgggagtttgagaccagcctgaccaacatggagaaaccctgtctctactaaaaatacaaaattatccaggcgtcgtgctgcatgcctgtaatcccagctactccggaggctgaggcaggagaattgcttgaacccgggaggcagaggttgcggtgagctgagatggtgccactgcactccagcctgggcaacaagagtaaaactccatctcaaaaaaaaaaaaaaaaaaaaaaagtgcagatccccagcgctctcacctgccactctgttgtctgcaaacaatcaatttctgaattgatttctttccccatttgaaaaggaaatcagcttttctccgcaaaattctcactggctagatttgttagattggggaaaggtgagaagaaagcaaatctttgtttggttccacacttactgaagtgggagaacactgccgctaattggtaacacatgctaagtgtgtgtgctgtaccatagtcttaagggatttgcaggaatgaacttgtttatattcccagccaccctaggaagttgctactgtttctatcgccactataaataggaagaaactgaggcaaagggagattaaagttattttctaagtcaaggtgccatggttcacacctttaatcccacctttaatcctgggaggcgaggagggaggattgctttagtccaggagttcgaggccagcctgggcaatatagtgagaccctttctctattaaaaaaattttttaagtcattttccaaggtcacacagtaaggagcagccaggtttggacacagggactctggcacaagtgtgtgtgtgtaacatcatttctatttaattttttgaatagaaaatattttcggccaggcactatggctcatgcctgtaatcccagcattttgggaggccaaggtgggtggatcacttgaggccaggagttcaaaaccagcctggccaacatggcgaaaccctgtctctactaaaaatgcaaaagttagctagacatagtgatgcgtgcctgtaatcccagctacttgggaggctgaggcaggagaatcgcttgaacctacgaggcggaggttgcagtgagctgagatcgcgccactggactccagcctgggtgacaaagtgagactccatctcagaaaaaaaaaaaaaaagaagaaaatatttttacatggtaaaaaaatatgtttataaaaaatacagagtgataaacctccacctaactttgttccccaacctgtcctgtcttcatccctcttcaaaacacaaaaactagaatatgtttttttggatcatcttccaggattttgtggcacagggacagatgcatacaaagatgtgtttttatttttttttctcttgcctttagccaccaggctgggtttcgcaccaagaaacgtgtctcccggagcttagaccacttggtgaattctctttcttgttatcagaattgaagacctgtaatgcctggttagtgtcaaggtttgtgaaacactgtttggataattacacaagttataaaacaatagctggtgtgaaaattacagatgattcataattacacatatggctgtcaagctttctgctagagagtctttcagcctgcgagaactcagtgggaggaacttttttttttttcctaaagggatctcattgctcattctgcaatgattagagctggccagaaaatagacactggcaatacagcaaataaagtcgaagggaaaatgcaatcagagagatctaggaggacgacaatattttttactgagcacttccgatatgccagacacatttttattatgacattttattttgaaacagttcaaaactcacaaaaattgcaaactagtgcaataatgcccatgtacccttcatccagattctcccaatggtaacattttttataaggatagtacactgtcaaaactaggaaaacatcgttgataccatgctgttaactcacatagagaccttatttggatttcatcattttttacatctctctctctgtctctctctccaccccatccccaccatctgtttgtctctgtttctctctgtctctcttttcatgtatctagttcttatagctctatagataaaggtaaccatcaccacagttgggatacagaactacttcatcaccataaagaaattttcaggctgggcgtggtggctcatgcctgtaatcccagcactttgggaggccgaggtgggcagatcatctgaggtcaggagttcgagaccagcctggccaacatggtgaaaccccgtctctactaaaaatacaaaaattagccgggcgtggtggcgcacacctgtcatcccagctactcaggaggctgaggcaggagaatcgcttgaacccgggaggtggagtttgcagtgagccgagatcatgccactgtactccagcctgggcaacagagcaaggctccatctcaaaaaataaaataaaataaaataaaaaataaaataaaataagggaaatatttttaaattgcaattttaaagatattttaagttctgtggactatatggtttctgttatcaaccagtcaactctgcttcatcgaacaactcatactcaatacatacatgaataagcatggctgtgttccaataaaactttatctacaaaagcaaaacaaaacaaaacaaaagaccacctttgagttggtcacaaactttgtgaaacatcattgagtcagttgcgtaagttatacaacagtgactaagtgtgagaactagtgatgactcccttcattgttatcagtggagatagatgatgcagacctggcttatttcttaaggtgcactgtttcaaaaagctacaaaaactcaggacaagctcctaattgtgaagatgaacaatttcactcatcttggtctactgccttgcaggggtgttttggtagagtggtttctcgacagtttttcttgaaacccaaatccaaatccaaagctttgctgagtaatccattatccttgaaacaaccccgtgaagttgtactattattcttgcatttgtactattattcttgtattttggctcggaagactgtgtgcctagctgctctgctatcctgtctctgtccagcacacacatacacacacacgcacgcgcgcacgcacacaaatgtcaacattggtttcctctggttggtgagatcatggggtgttttttcatttttgttttttgagacagagtcttgctccttcgctcaggctggagtgcagttttgtgatctcggctcactgcaaccttcacctccggggttcaagtgattgttctgcctcagcctccccagtagctggaattacagtctcccaccaccatacctggctaatttttgcatttttgttagagacagggtttcaccatgttggccaggctggtctcgaactcctggcctcaagtgatctgcccaccttggcctcccaaagtgctgggattacaggcgtgagccactgcacctggcccaggctggggtttttattatcagaaactgctagactttttcccgaagcggttgaaccatttgacactcccttcaaccaggtatgagagttcgaggtgccccacgaagtgtgcaacatcttggcgttttcatcttatttatttttattgaatttattgtagttttttgttatttagtttttatttcataatcataaacttaactctgcaatccagctaggcatggaagggaacaaggaaaacatggaacccaaagggaactgcagtgagagcacaaagattctaggatactgcaagcaagtggggtgaaggggttctctcccaagctacagaaggaatggtctggtcgttaagataaaatacaagtcaaacttagagttgttcacagtcagcaatggtgatctccttgctggtcttgccattcctgggcccaaagtactccatggcctccacaatcttcatgccttctttcaccgtgccaaagaccacgtgcttgccatccaacccctcagtcttggcagtgcagatgaaacactgggaacaatttgtattgggtccagcatttgccatggacaagatgccaggccctgtatgctttaggatgaagttctcatcatcaaatttctccctgtagagggacttgccaccggtgtctttatggcgtgtgaagtcaccaccctgacacataaaccctggaataattctgtgaaagcaggaacccttataaccaaatcctttctctccagtgctcagagcatgaaccttttctgctgactttggaaacttatctgcaaacagctcgaaggacacgtggcctaagggctctccatcaacggcgatgtcaaagaacacggtggggttgaccgtggctgatagtacaggactcgcagcggcagtgtctgcaaagcctattttaattttttaaaaccgatctgatgggtgggtggtagcgtctaattgtggcttgaattggatttcctctcatgacgaaagaagttgagcattgtttcgtgtgctttatggccctttgtatgtctgctgttgtcaagtggacctgtgtacaccgagagctgacccactcgtgtatcagttctgtggggctgctgtaacgaactagcacaaactgggtggctttaaacaaaagaaatgtattctctcagagctctggagactgtaagtctgaaatcaaggtccccatggtgtcggcaaggccacacgccctcaggctctgcgtagagtctttcctggcttctgttgacggctgctgaccactggccttccctggctggcagctgcaatactccaatctctgcctctctcttcacatggccctctccctttgtgtctgtcttcatattttcttccctgtttttataaggacaccagtcatactggattaagagtccaccatactctagtaagacttcaactacttatacctgaaatgactgtatttcaaactaagatcacattctgaggtcctggcgattagaacctcaacatatcggctgggcgcggtggctcacgtctgtaatcccagcactttgggaggccgagacaggtggatcacctgaggtcaggagttcaagaccagtctggccaacatggtgaaaccccatgtctactaaaaaaaaaatacaaaaactagccaggcgtggtggtggatgcctgtaatcccacctacttgggaggctgaggcaggagaattgcttgaacgtgggaggcggaggttgcagtgagccaagattgcaccatccactctagcctgggtgacaagagcaaaactccatctcaaaaaaaaaaaaaaacaaaaaaaacaaaacaaaacaaaacaaaaaaacttcaacatatctttttgtgggggaacacttcaacctataacattatggattcagtagcctgccctttaaataatgtccaggctctaggctacatctcagatgcgtcagtgatgcattccaaaagtggtagtgttaccatgcaaccagtgggctcacagccccatgtgcatagaggccaataccatagcaccggcttttgagaaaagaaaaacttaattgcacgttgatcagcaaaaggacataggaggaaatacctgactctgtctccctgagctgggggctggagcaggttttataagcatggagtaaggaggcgtgatctgattggatctggcaataaggtgatgctggagaagcatgatctgactggatcctgccatggggtgacaccaaggctcaaatctgatcggatcctggatcctgccatgcagtgtcagcttcttaattcagtccctgctcctccatccaagcactttggttccccctgtggttgcacgcatggttcatctgggtgtactcaggttatatgacctgaaataccatggcaactgaaaaacatctcacaactttgttacataaaagtggaaccaggctgggcacagtggctcacacctgtaatcccagcattttgggaggccgaggcagttggatcacctgaggtccggatcacctgaggtcaggagtttgagattagcctggccaacacggtgaaaccccgtctctgccaaaaatacaaaaaaacatcgctgggcatggtagcacgcacctgtaatcccagttactcaggaggctgaggcagaagaattgcttgaacccgggaggtggaggtggcagtgagccgagatcgtgccactgcactccagcctgggcgacaaaagtgagactctgtctgaaaaaaaaaaaaaaaaaaaaagtgaaaccagattggtctgtgccaactctggggcaggcactgtgcatgaggtggaattgtcatcttggtgttacaggtgaagagtgtgacctatacaccatggctcagagaggtcaaggaacttgcccaaaactagacagctgggaatggctcgcaggattgtaggactccaaatttctttttctttcttttcttcttttttgagacggagtctcgctctgtcacccaggctggagtgcagcagcacgatcctggctcactgcaacctccgtctgccaggttcaagcgattctcctgcctcagcctcacaagtaactgggattacaggcgcccgccaccacgcccggctaattttttgtgtttttaatagagacggcgttttgccatgttggccaggctggtcttgaactcctgacctcaagtgatccaccggcctcggcctcccaaactgctgggattaccggcgtgagccaccgcgcccggccctggattccaaatttcatgcccctcccacaactttcccaggtcccagttcagttcttgcaaaggcctccaggtggcgcgatagagcaaatggtggattccgctaacttgggtttacaatttcttcctgggaggcttgcagggtggggcacttacttgaacgtgcacacgaaacaccaggggatcttatggaaatgccgcttctggttcagttggtctggagtgggactgtgttttttaatatgcttccagggcatgtcgcttcagctttgagcagcaagagcttcattcagtgggataaacagccctcgccacacctgtgcaggcagccaactccagaacagtaactaatgacgttcatgacaatcacagaaacaacgatttccacatgtttattctgtgccggcctctgtgttcttgtctttgcctttatgcgcattctctcctttaatgctcaaggcagtctcatgaagtagcatcattttacagaataggaaacaggtaggattgaaccagtctgtgtctattgcaccccttccctttttcctacaggatagatgccatccctgggggactcagcccaaggcatgggggaagagaggcccgggctctgggggattggctgcaaggccaagcggtgggacgaggccgcttaggcagcgggattgtggggattaggaggaagagtgagatcaataatatgcaaagggccgggcacggtggctcacgcctgtaatcccagcactttgggaggccgaggtgggcagattgcttgaggtcaggagttcgagaccagcctggccaacatggtgaaaccccgtctctactaaaatacaaaaaaattagccgggtgtggtggtgagcacctgtaatcccagctactggggttgggggtgttgctgaggcaggagaatcacttgaactcgggaggcacaggttgcagtgagctgggatcgtgccgctgccctccagcctgggcaacagagccagactcctctcaaataataataataataataataataataataataataataataatataataaaatagaaagatctgcaaagtaaccccagatcctgcactacctcccttacaactctcaccaaaggaatcctttctctctctctctctttctctctctctccctttcatttctccctctctgtttgcccttctctttccagatctctctctgggtctctttctcttcatctctcctcctccctccctcctttccttcctcaatcctcttgctctccctatgtccttcttccatcactttctctatgatcagtgtttcagtctcttctctctctctgtttctctctctctctttgaatgtcaccaaagctagctcttcccctctttctgaatctttctctaccctccccacccccagtctctttaaacttgagtctttctgttgaggtggtatgagcctacagtcccagctactccagaggctggggtgggaggatcccttgagcccaggagtttgagtccagcctgggcaacatagcaagattctgtctccaaaaaaaaaaaaaaaaatctgagtctgtttgtctcactctccccaagtttctctctttaagtctctctgagtccatctgccttaaatctattccagtatatctctctgttcctctctttcttccttttcctcccttcctctctccctccttcctctcccctccaaatctgtctctctccatctctctctgtctttacatctgtttgagtctctttcttttcttttctttcttcttttttcttttcttttttttttttgagatggagtctcgctctgttgcctaggctggagtgcaatggtgcaatctcagctcactgcaacctctgcctcctggattcaagtgattctctggcctcagccttctgagcagctgggattacaggcacccacctacatgcttggctaatttttgtatttttagtagagacagggtttcaccatgttggccaggctggtcttgaactcctgacctcaggtgatcagcccgcctcggcctcccaaagtgctaggattacaggtgtgtgagtcaccgcacctggccaagtctttctttctttaaagttctcagagtctccctacttcccccattcctaccccttcacctcacatccttatggctttggccctatgtacctatgtttgctttcgctggctcaatctagtgttgtggttaccggcacgggcttaggactcctacgcccttgactcaaattccggctctgccaagtaccggctgcagaaattgagccaaatgcaccaaacctccctgctcctcagcctcctggctggctgagggcctccctcctaaggtttctgtcaggaccaggaggaataagcatgcaatgaatgcagtgaggtgtctggcactggatgaatggtagatgttgtcatcatcatcattattattattactaataaaaggtaacccacagccagcctctctgtagccaacaattagatgcttatctggtgtgtggaatgcagggggggagggccctcccaccaataaaattggggccactccctgacctcggtttctcgccaggatcaaccaccccaagagcgaggaccgggtggaggatgtgccagctttctgagccacacctgctgacacttttcgccctcagtcaaagcctatctgagatcttcagccaattctgtgcatttcatttttttttcttttataaaaagtggtttatctatttccctttttattttagagacaggtcttactatgttgcccgggttggtcttgaactcctgggctcaaacgatcctgctgccttggcttcccaaaatgctgggattacaggtgtgagccacaattttgtacatttcagagaggtatgtattcaagtgagaatcagccaccgctgggttacattaagtgtctggtttagcaagtcagggatataaaacagcatcagaaggtggccacagtgagcaggaaccacaacacacaaacacacacacacactagtctcacgggtggctcagccccaggtcaacatccattcaagctatggcttgacaatttgacaagctactttttactccatttatagcttaggtgaagaggttgaatattaaatgcattattatcatcactggttcaaacagattcctttcttcattttcttttcttttcttttcttttttcttttttttttttttttaagatggagttttgctcttcgtgcccatgctggagtacaatggtgcgatcttggctcaccgcaacctctgcctcatggattcaagcgattctcctacctcagcctcccaagtagctgagattacaggcatgcgccaccatgcctggctaattttttgtatttttagtagaggtggggtttctccatattgatcaggctggtctcgaactcctgacctcaggtgatctgcccacctcagcctcccaaagtgctggaattacaggcatgagccaccatgcccggcccctttcttcattttctctctctctttctgtgccttcttttcctccctcccactctccctcagtcctacaaaatgtgcagtgtggttcttatgtatgagtgaatgtgtgactttaatttacttaactggcattaggtgatattcttactctatcctaagccactttgcaaatagcactatgtttttaaggcccacccgtgttgttacgtgttcatacatgtgttcgttgcatctgacttctgcataggaacttcatggcgggacgtccaccacatttacacaattcccctactgatgggcacttggtggcttccagtttctggccactgcaaagaacactgcaaagcacaagcttgtacgtgtccccttgtgggtgtgtaagaatttctttgggatgtgtagccaggagagaaatcgctgagtcattgggtgtgtgtatacttgtttgatgaaatagcatcagctccgtcttcataattggagacaccacactcaacccagttgcacttgaacattcgaatgtctacacatccctgacagcccttgaccttgtctgcccttctcaaaatgagaagactacttgatgtaaagtcacatctcaagttacagtatctaaaaagtttgaacatctctctctctttttagagaccaggtgtcagtctgcgatcacagctcatggcagcctcccaggctcaagtgatcctcccacctcagcctcaagagtagctgggaccacaggctgacaccaccatgcctggctaattttattttattttttattttttatttttttttgagacggagtctcgctctgttgcccaggctggattgcagtggcgtgatctcggctcactgcaagctccgcctcccgtgttcacgccattctcctgcctcagcctcccgagtagctgggactacaggcgcccgccaccacgcctgcatgcctggctcatttttaatatttttttatagaggccgtgtttcgccatgttgcccagggtgttcttgaactcctgagctcaagtgatccgcctgcctcggcctcccgaagtgccgggattacaggcacgagccaccgcgcctggccttgaacatctctatgtgcatgttagcttttggaattctgcttctgcaaatcacctctttgtagcttttatccatttacctataaggatatccatattttttctcattaattcacaggtgcttcttgcatattacaggttctagttctttgtccattttggatgttacaaataacttctcccattctgataaatgcctatgaatcgtccttaccttctcttaaaccaaagtgtttaattttaaaataatcaaactaatcaatgttttgtcatatgatgtgtgttttttttaggtcttaagaagtcatcccctatcacagagattcaaaaataggccgggtgttgtggctcatgcctgtattcccagcacagggatgccaaggcaggaggatcacttaaggtcagtagtttgagaccagcctggccaacatggcaaaacccccatctctacccaaaaatagaaaaagcagctggacgtagtggcatgtgcctgtagttacagctacttgggaggctgaggcatgagaatcgcttgagccggggaggcagaggttgtagtgagcccagatcatgccactgcactccagcttggacgatagagtcttcaaaaaaataaaaaaataaataaaataaatatatattcaccatgattttttctattaattttataatattatctttcagtggtctttaatacagctggaatccaatttcatgtgtagtattagaaatctaggtttctttttctctgcacagcagacgagtttttctaatgccacttactaaatataccatcattctcccactaatttgtgttgatattttatcttatattaagtccctaatatattatatgatgatacatcagtttcctatgattctctttctgggacctctctcctgcctctctggtctacttgtctgttcttgcactgatcccacccttttttaaaaacactgattttgttttgtagcatgtcttaatatcgagtagggcgaggagcttatttcttgcaccgccacagccgcatttttctcaccacttacatcaccatgcaggaaatacactgatctcctccacccttaatgggaacaatttacagacatctgtcccctcctggttctggatccagcctccatgttaaaaagacatcttcatccaggaaaagaaagtcaaggctgcccaggaaaatctgcacaatgtcttagctcatctttcagtttccagaagcttcatttcccataccatcctctctatatcggcatatagaaaaccaactacggtagcccggacacccaagattgtattctgcctgttccaagcccagatgtaggaagtccatgcatggagctccgaaggaaatcatcagaaatgtgagctgctttctgtaatcccatctttatcctgcggcttttattctcatcatgcaaggtggctggtccgtctccaggcacccatattccaggtgagaagaggtggaagggaaggtccaaaggtccaaacattactctctctctcctatttatttatttatttatattttttatttttttaagacagagtcctgctctgtcgcccaggctggaatgcagtggtgcgatctcggctcactgcaacttccaccttccgggttcaagcaattctcctgcctcagcctcctgagtagctgggattacaggtgcccaccactgtgcccagctaatttttgtgtttttagtagagatggggtttcatcatgttggccaggctggtctcgaactcctgaccccgtgatccacctgcctcggcctcccaaagtgctgggattataggtgtgagccaccacacccagcctactctttctcttttatcagcaaaacaaaaactttcccagaaactccagctttgtcttcttgcttataactggatgacatggccacccggatgtatccaggtcatatgccaatctgagcaatactcgggctcgtcagtaatgcagtgggaagaatgataagcacatctcagttgcacccagcttgccctgtgccaagtcagacaagtcacaaaacaccaacctctgcctcttagtccacacacatctcccctctgttcgcctgtttgcccttgagcctgaacttgatgggaaaatgcatccaggctctgccattagcaacaatcagcgtggggatagtgcttgcatctttggtgggcagagaaccaagcacactgtttctcctaaactcttggtttatttttcttgagacagggtctggctttgttgcccaggctggtctcgaactcctgggctcaagcaatcctcctgcctcagcctctgaagtagttgggattacaggtgtgagccaccatgcccggcctctcttcttttcatcacggttgtagcaattgttccacaagtgtattacctttacaactgttaaagaaactagaaactatccaaatgtctcctcatagtaaaaaaatggctcaataaatcggagtacatttacacaatggtatactgtgcaacgatgagaataaaacatttacaaccataaacaaaaacctgggcggaccacacaatatataatactgagaaaaaaaaaagcccaacacaaaataatataagacactcattgctttttttgtttgtttgtttttttgtttttttagacaaagtctcactctgtcaccaggctggagagcagtggcacgatctcagctcactgcaacctctgcctcccaggttcaagcaattctcctgcctcagcctcccaagtagctgggattacaggtgcatgcctccatgtccggctaatttttgtatttttagtagagacggggtttcaccatgctggccaggatggtctcgatctcttgacctcgtgatccactcggctcagcctcccaaatgatttatttatataaacttattatacttctatatgtctatgtaaataaatttatatttatatgttgttcataaatgggacaaattaatttatggtgatagaagtcacaaaagttgctacacttggggagaagtcatgaaagtcgctacccttgcaggcgagggatttaggtagtaatggaagcggctacatttggcaggggaggtagtgactgcaaggaagaccccactggtttttctgaggagatgcttaggttccgtggctctgtctgaatgctggttacaagggtgtgttctgttttgtgaaacttcactgccatttatgatacttctgtgcatgtttctttctttctcctttctttctttctttctttctttctttctttctttctttctttctttctttctttctttttttgtttcttgagacagtctcattctgtcatctaggctggagtgcaatggcgtgatcttggctcactgcaatctccacctcccaggttcaagcgattctcttgcctcagcctcccgagtagctgggattacaggtgcccaccaccgagcccggctaatttttgtatttttagtagagacagggtttcgccacattggccatgctggtttcgaactcctgacctcaggtaatccacccgcctcggcctcccaaagtgctgggattacaggtgtgagccaccatgcccggccctgtgcattatctttcaataaaagttaatttaaaatattgctgcaagggcatctatggggcagacatcattggttgttcctcccgttctttgatgtcggaatcctgatttctctcaaggagcagcttctacatgctttaggggaggtcctccactccatcgtgaaagaataatcctgtttggttcaaatcaaccatgttaacctctccaccccactccccaccccaccccaccagtctgtgactggtttaggaaaggacatgtgacccaattctggccagtaagaataagataaaattctgctggggtggtttctggaaaagcatcatccttctcaaagacagacccactacgggtgttgatcttaaggatgatgaccccccgccgaggagaaccaagcgaaacacagcctgacgccctgtgtctggagctgcccttacctggatttcttgatatgtgaaattaaaacttatttactattgaagccagcatgaatcttctcttgttcctcaaagcagcttaaccggaaacatcattttggaaaatgtgctcaagactgccccttagctaggattctgctcctatctagatttttttaagattaagaaaaaaaaaattgaggccagatggctcacgcctgtaatcccagcactttgggaggctgaggtaggcagatcacctgaggtcaggagttcgagaccagtgtggccaacatagcgaaaccctgtctctactaaaaatacaaaaattagccaggcatggtggctcacacctatagtcccagctactcaggaggctgaggcatggggattgcttgaactggggaggtggaagttgcagtgagccgagaatacgctactgcactccagcctgggtgacagagtgagactctgtctaaagaaaaacaaaaacaaaaaacaaacattgaattacaactgtcacccagtactatttgcccctattttcacaccacaccacacaccctggcagcccagtctttctggaatgtcccctaaaaagtcgtgaggacttgtaaatggctaggcacaaaggggaagataaaggtgacaattattggatcattttgatgtatgtgtccttctctcacacctttgactgttcatcaggcagacacttcttatctcttcttccttgctggtaaggactgcacccgtgacagagaaatgtcagaaactcactttctcagcttctcttgaagctagagtgtcagcattgggaccttctccaatgagtggtcattgagacccaagaacagatccaggggtgtggggggactctggaaaagactttctttcctaatgaagagagctctgccaacagagtctctccttcctgccttttgtcatggtgcgtgaggatgtgatgtctggagctgtggcagccattttacagccacgagattacaagcctaaaggagaaagctgacatattttcttcttcctgctagaacataagcttaaggaaggcaggggtttggtgtctgttttattaatcagtctatcccaagtgtctataatattacttggctctcataggtgctcatgagttgaataaatatatgaatgaatgaatgcagagggcagtagagaagaaagatgggtccctaatgatgtaatgtaggaatcaccaaaccacagtacttccctcttttggggcttcttattatgtgaaataatacacgtccttattgcttaacccactttgagttgggtattttgttactgacaaaattttctagtgtaattccttttctagagtgttcaatttccaaagtattccctggagtgactttctataaccacctgtgagtatcttgagaaatcttagagctggattggcacgtggagatcattacgtttcaatcctcccattttacaggtagagaaactgaggtccagaaaaagtacaaatgacctttacacaggtcactcagaaagtgctgaagactagaatgtccatgtgttgatgtgttgtccatttcaatgactaccacgcccacaaccttcttaggggccctgccctgcccactgctatggatgaaggggtggctgggggatccatgttgcactctgtgggcccacctttcagactagagatagagtctgcatctgaccctaggacagccaaccagattttttctctaggggctatgaacaaagaaaacccagtaactggagccagttatgggggagagaagagatgctttgataggcaacaggcagtcaatgtaatgagaaaacagaggtgggatgagaagaaagagaccgtgaaagacacatacctaggggagaagggatagagatcccacaggcagctgcttctgccctgacattttccaatttaaattaatggatattcttttgataactgatatggcctggccctgtgtccccacccaaatctcatcttggattttaatttgaatcataatccccacgtgttgggggtgggatctcatgggaggtgattagatcatggggacagtccccccatgctattcttgtgatagtagtgagttctcacaagatctgatggttttataattttcccccttcagtttgcccttctcctttcggccaccctgtgaagaaggacatgtttggttccccttctaccatgatcgtaagttttctgaggcctccccagccatgctgaactatgagtcaatcaaacctctttcctttataaattacccagtcttaggtagtatctttgcagcaacttgagaatggactaatacaataacctacctcccgtttctaccctggccaacaagcagctccagtttgttctccacaaagagccagaatgttctcctttgtgcatgaaccagatccggctggaaaacctccaatgacttcccaaattctcagagaaaacaaacaagtgtccagctctatgggtcttctttcagctcctggagaatgtccagcatgctccaatctcagcacttggcacttgacctcctctctgtctggaacatcagtgccccagatgttcatggggctggccactttctttctttttttttttttttttgagatggagtctccttccatcacccaggctgaagtgcagtggcgcaatctcggctcactgcaacttctgcctcccaggttccagtgattctcctgcctcagcctcccaagtagctgggattacaggtgtgcaacaccacgcccagctagtttttgtatttttagtagagacagggtttcaccatgttggccaggctggtcttgaactcctgacctcaagtaaccacctacctcagcctcccaaagtgctggggttataggcatgagccactgcgccctgcctggggctggccactctatcctctcagtctcaaatggtacctcctcggcgaggccctttgtgtttgttacagtggctactgtaacaaatcactgagagtctagttgcttaaaacaacacagatttattctattgtagtttgggaggtcagaagtcctaaagatctcactgggcagaaatcaaggtggtcggcagggctggttccttctggaggctctaggggagggtccattcccatgtcctcctgccttccagaggttgcccatattccttggctcatgccccttccttcaccttcatcatcatcatcattattattattattattattattattattactattgttagagattgggtcttgttctgttgctcaggctggagtgcagtgatcctcctacttcagtctcccgagtagctgggactgtaggcacacaccactacacctggcaaattaaaaaacattttttttttttttagagatggggtctccctatgttgcccaggctggtcttgaactcttggcctcaagccatgcccctgccttggcctcccaaagtgctgggattacaggcgtgagccaccatgctcatcttcctctgtcttcaaagccagcagcatagcatcttccagtctctcattctgatctttccgcctccctcttataaggacccttctgattatattgggtccacccagataatccaggatcatctccccatctcaagacccttaatcacatcagcaaagcccccttgctatagaaggtaacatattcacaggctccagaaattaagatggcgtttcgaggtgggagggaggcattatgctgcctcccatgccctccttgatcatccaatgtagagaccccccccaccaactcacgacatttcctctcttgccttatgccctgctctcattgtgttcatgtcacttacataattactatggcacatacaagtttatctctctctctcttttgtttttttgagctggcatcttactgtcgccaggctggagtgcagtggcgtgatctctgctcactgtaatctccacctcccaggttcaagcaattctcctgcctcagtctcctgagtagctgggattacaggtgcatgccaccatgcctagctaatttttgtatttttagtagagagggggtttcaccatgttggccaggatggtctcgatctcctgaacttgtgattcgcctgctttggcctcccaattatctctctctttattgtctgtcttccactcctggaatgtgagctctacaaggcaggaactttttggtctgtttggcccaatgccttatccccagcacatggaaccattcctggtgcaaagtagccacatgggcccgggtgtggtggctcatgcctgtaatcccagcactttgggaggctgaggcgggcagatcacttgaggtcaggagttcgagaccagcctggccaacatggtgaaaccctgtttctactaaaaatacaaaaactagctgggcgtggtggtggacgcctgtaatcccagatgcttgggaggctgaggcaggagaatcgcttgaacctgggaggtggaggttgcagtgagccgagattgtgccactgcactccagtgtggttaacagagtgagactccatcgcaaaaaaaaaaaaataataataataaataaatgaaaataaaaaatagccacctggccaatatttatgaagaaggtgaaaagtagtctgactggacctctgtttctcacaacccaagtgacctcatagacaaaacacatgagcctggaggcggagatatgacttgttcacagccaccctgcacagggaggagacacaggaagattccacttctcagtttatttctgggactaaatttgggtcagagctgcagagaagggatgggccctgagcttgaggatgaaagtgccccagggagattgagacgcaacccccgccctggacagttttggaaattgttcccagggttcaactagagagacacggtcagcccaatgtgggggaagcagaccctgagtccaggagacatggggtcaggggctggagagatgaacattctcaacatctctgggaaggaatgagggtctgaaaggagtgtcagggctgtccctgcagcaggtggggatgccggtgtgctgagtcctgggatgactcaggagttggcctggatggtttcctggatccacttggtgaacttgcagaggttcgtgtagacacccggtctgttgggccgggcacaagggtaatctccccaggacacgagtccctgcagggagccattgcagaccacaggccccccagaatcaccctgcaggagagaaaggggggcatgagagaggcagagatgtggcaaagtgggcagaaggagacatgagagacccagagatgcccatagatggagaagcagatgggaacagacacacagagatggaaagtacagagatgaagaaatgcagaaaaagacagagatggagacacaggcaaaaggagagagagggagaatgttattaatatttcactccaaatccagcttttttttttttgagatggagtcttactctgttgcccaggttggagcgcagtggcctgacctcagctcactgcagcctccatctcccgggttcaagcaattctcctgcctcagcctcccaagtagctgtgactacaggtgtccatcaccacacccggctaattttttgtattttttttgtagagacggggtttcaccatgttggccaggctggtctcgaactcctggcctcaagtgattcgcccacctcagcctccaaagtgttgggattacaggcgtgagccaccatgcctggcctccaagttcaacctttagaccccatttgtcactctccactccatcttcctcttccagattcctgttgtccacacatcatttcgggggggtctgtgacccttcctctccacatctcgaatcttcgtctctactttctgttccagcctgtctccctcatcgtgtatctctccgcctccctttctctctcactctcccctccagcctgtgcaggccttatttctcttactggacacacaccttccttccccattctccaccaacccatccttatacctcccttctgcaaaaatacggttctcagcccctggatgagggttcctcgatctgggcactgtgggcatctgaagctggataatggtttgttgtggaggcctgccgtgtgcatcatagcatgttgaacagcacacttggcatctatccattagttgccagtaatgcccctccatatagttgtgacaaccaaaaatgtctcctggtattgccagtgtcttctaggggcagaatcactcccaatagaaatccattcgcttggactaatttgtgtttcctgtcttcaattccccatacctccctataattaccctcctataataatactcactgctcttcaacagtcatttttttccctcttttccttctttccttccttcctctctcttttctttcttctttctttctttctttttctttctttctctttcttcctttctttctccttccttccttcctttctttctccttccttcctttctttctccttccttccttcctttctctctccttcctcccttcgtctcttttttttttctttctgacaaaaacgtcttgctttgtcacccaggctgctgtctggagtgcagcagtgcagtcatggcttaccgcagcctcaaacgtttgggctcaagcaattctcccacctcagcctcccaagtagctggaactacaggtgcaagccaccacacccggctaattttttttttttttaatttactacatatttatctatctctttattgcctgtcttccacttggggaacatgaggtccacgcggcaggaagtttttggtctgttttgcctgatgccatatccacagcacctggaaccattcctggtgcaaaatagccactcggctaatatttatgaagaaaatgaaaagtagcttgagtggacctctgtttgaggtagagagaaatgtctatctcccacctgggcacggtggctcacacctgtaataccagcaatttgggaggccgaggcaggcagatcactggaggtcaggagttcaagaccagcctggccaacatggtggaaccccatctctacggaaaaaaaaaaatagccaggcatggtggtgggtgcctgttatcccagctacttgggaggctgaggtggaagaaatgcttgaacccaggaggcgcatgctgcagtgagctgatatggtgccattgcactccagcctgggtgacagagcgagactccgtctcaaaaaagaaaagaaaagaaaagaaaagaaataaatatgtacatactacaataatgatgtaagtggtatgaataaaatctactaaaataaaaacaattagtatttttatttttttaatttttagttgcccaggctggtcttgaactcctgagctcaagtgatcttcccacttcagtctcccagagtgctgggattactggcatgtgccattgcacccggcttcatttcttacttacatgcatgcaaaatatgaattacagagtcctggtatcaattattaggaaagccaagacttgcctttttcccagtagcagacactgtttcaaagcaaacaagcttagctgcctgtacctctaaatttcaactttcttgtggtttaatttctctcattattttttaaatttaatatctctgcagagtttcttttgagaggctgttagttaactgctctgagccttggctccttgtttgtaaaatagggccaataataacaggtaaatgagttaatgagctgaggcatgcaaaccacttaaaacagtgtccagcaattagccagatgctattatttttatactattggtattagtattgttgtagttgttattatttcttgcttgtagcttttagtggccacacccagaccacacaccggtatgaaaaaacaaacaaaaaaacaccttgaggtctggaaaaacaagatactaaccttgcctacagaaaggctaaatagttttaaatgccaccacttgaatgagatgtgatttcttttcttttctttttttttttttgagacggagtctcactgtgttgcccaggctggagtgcagtggtgcaacctcggctcactgcaagttccgcctcccgggttcaggccattctcctgcctcagcctcccgagtagctgggactacaggcgcctgccaccacgcccggctaattttttgtgtttttagtagagacagggtttcaccgtgtcagccaggatggtctccatctcctgacctagtgatccacccgcctcggcctcccaaagtgttgggattacaggtgtgagccaccacgcccggccgagatgtgctttcttctgttaaaagttttccccctcgcaacccacccccccacacccagggcacagagaagaaatggggagagctggggaggtgttgcatttgtcaggtttgtacaatttggggggagcttttcatagccatgggactggagtactcctgaatccccagcttcctaactactgttgaaacacacaccctgctaatgagagcttgttaacttacgtccttctagatcccttgggagcctgaatacagagaagggtgctggttgatgtaacagtttgattttaaattctgtcttcctcaacagatacagcttccattagaacatagggaagctctgtgttggtgaccaagaaatacttgcagagcattcgcccctgcctacacctccagcgtcactttctactgttgcccccacttttgttctccagttgcattggtttcctcttcttctttgaatcagccaaattccttactgcctcagggcctttgcacgtgccttttctttccccttaaacttcacgagtttagcttctttgtgtcatccattctctgctcaaatgccacctctccaaggaggctcccctgaccacctttttgaatattggcccttattgtttactatcctaaaaccatgttttattttggggttaacctttaccactctctgaaattgccctatttatgcagattcttgaccacagagttttttattttttaactttgttcctccagcccttccagcagctttgcaattaatcccctgtattaaatattctcttgtaaaaatacctaccagatttctcttttccttcctcaagatattttaccagcacttgctagaaaactgtcatattacagattttgttgaaacaagacacttaactaccacacgcctgaaaactgccaaaactgacatctgtaacacggagtgcccctattagatatggtatctttatgcagtgcacaacctgcccaaccatacaaaacagccctgatctttccctctagatccgtgccatccaatacagtaactgctagccacatgtggctactgagcacctgaaatgtagctagtccaaattgagatgtgctgtcagcataacatatatactcactttcaaagacttaatatgaaaacaagaaaagaatgtaaagtatctcattcataattgttttatattaattacactttgaaatgattgtatttgggatacattgggttattaaagttaacttcacctgtttcttttttacttgtttttttttttctttttgagacaaaagtgtcactctgtctcccaggttggagtgagtggcacgatctcagctcactgcaacctccacctcctgggtttaagtgattcttgtgtctcggcctcctgagcagctgagattacaggcgcccgccaccatgccaggctaatttttgtatttttttttagagacagagtttcgccatgttggccaggctagtctcaaactcctgaccaaaggtgatctgcctgcctcagcctcccaaagtgctgggattacaggtgtgagccactgcgcccagccttttttacctgttttaatgtggctactaaaaaactggaaatgacataagcagctcagcattatttctactaaacaccactactctagggtatgagctctgtgagaacaggggtcctgactgtcttggcaattgctggattctcagaatttggcaacgctccatgttaccgagttggcactcagtgtgtatctgctgaataaagagaggtgtcctcacctggcaggagtctctacctgctttgtcaccggcgcagaacatggtgtcatctatctgtctcgggtaagcatcctcgcaccttttctgacttagcacgctgatattcaagcactggaggaccttagggaagtgcactgtcaaacaggaacacaatgagaagtggagaaagatggaaggcggcagagatgggtcggtatcaagaagaacctggacactcaccttgggggctcttggttgtcccccagccagacaccaagcactttgtcccagcagagggacaatgagaggagacgttgatgggtctgacatctttagtgggacgaattcttctgttcagtttgatgagcatgaggtcgttagagtggccagggtgggagtagccagggtgggggatggatttgaccccctggaacatctgctgcccagattcataaactggtgacagggagtagtggccgagacggactctgaaaactctgaggaagatggggcaggtcaccaccaaccctgatctctatctccacgtccaacgccaatcccaaccccacacccagccccagccccacccccatccccacccccggtccccaaaccatcctcaactccctcttggtctccaatcccatgcctgtccccatcccagtcacaattccaaacccatcccattcccaaccctaattctttccctacccagaagccatcaccatatgcattctcaagcccaaatccaaccatctccaaccccacccaaaactccaatccccatccttcattctatatctgctcccaatctcaaccctatctccatgctatcttcatttccaccccagcccgattttcacccacccccaattctaaagccaatcccaattccacctccatcccaaaccattcaacaaatatatgctcctaaccccaaatccaacccatccttggctccttcccattccctaccacaacactctcccctctccaacctcatcctcccaccttgctcccccgcaaaactccatccttagtcctatccccaactcgacctcctcctgctcccacatccccaacccatccccaccaaccctcaccttccatgacacccccaaccccacttccccgtccccaccagccctcacctccatgacacccccacccccacttccccacccccacccccacttccccgtccccaccaaccctcctcttggaactcccactcacttcttcctgcagtgggcggccgtgagcagccactgtggatgcaccaacaccgccccgcagtagagctggttgggccttagcaacagcgcggcctgccacggctgggtgtgcatatcgcagtcggatccattgatgatgcggctgctgctgtcatccgaccgggcgtcttccccggccccagctcccaggtcctggttgctcccagagggcacggtgttagaggggtggtcacaggaaacatcattgttggcgagaacatgctctgggaacggaaaatgggttgggcggggctcagaggcggggcttgggctgggggtgggtttcagactcaagaggccagaccagctagagggtgggtgtctgacatgctgagggggcaggggcagggcctggagaataagagtggcacctctcaagcccaggctcaagctcaaggacagagcccaggctcaggtagggttactggactctaactggacctcacagattcctggaattggctagaactacatgtgagggtaaaattgggtacaggattcctggacaagctcaggggtagtgccaaagctgtgggggctggagcctggggatgggagggagaccagggctttagggatggaactggtctcaagaagtggggtcaggcctcagtgagtggggtcagggctggaggcaggaaggggtttggaattgacttagttagggccagggtcagggttacatgttagagtctcctataaagagctctgactttgggctgggggcggtggctcacgcctgtaaccccagcactctgggaggccgaggtgggcggatcacctgaggttgggagtttgagaccagcctggccaacaaggtgaaaccctgtctctactaaagacacaaaaattagccaggcgtggtggcgcgcacctgtaatcccagctactcaggaggtggaggcacgagaatcacttgaacctgggaggcagaggttgcagtgagccgagatcacgccactgcactccagcctgggagagagagcaagactgtctccaaaaaaaaaaaaaaaaaagctctgactttgaagggggttctagaaggtacccacagaatagggggtggagcctggcccaaaggggtgtggccttaggcggggtccactagagtctggcctaggggcgtggttgaggaaaggaggtggggtcagagctcatgggcggagctagggttccgaaagcaggaccaggaaagaagggctcagcttagggggccacatggaggggaagagcaggcctaggtttctgaattctcagatgaaaacatgccttctcaatcctgtcaatctcctcctctcacacacagacctacagactacatgcatgccccactccatcatcagtcctcccgtgcccattcactggttcttacccttttttttttctttttttctttcgagacggagtttcgctcttgttgcccaggctggagtgcaatggcgcgatctcggctcaccgcaacctccacctcccgggttcaagcgatttttctgccccagtctcccgagtagctgggattacaggcacgcgccaccacaccagctaattttttgtatttttagtagagacggggttctccatgttggtcaggctggcctcgatctcccgacctcaggtgatccgcctgcctcggcctcccaaagggctgggattacaggcgtgagccaccgcgcccggcctggttcttacccttgctgatggccctggcaccaccatcattcacgaactcaccccaagaaccacgcgcacaacagcagtaacagccaagcacgcacgcagttctgcagacacgcccatgttgcctccacaggtgcagctaacatacagctctgtctccaggtacacacgctcccgggcagcctagcgggatcgcacaccctcatccacagtgtctcagtgccacgcacagatgccgtgtgtgcacagatgttcagactgccacatactcttctgcacacaggcacacactgcaagtcagtcacctggcacccatctcccagagatagctacccctgcaccctctatccctccaggcagagacagaaactccagacacacagctgcaccatcacacatacagtagcatttacacggcctcacacagacacacacagtcacatacagtcacccctacacagagcttcaggtagtcacacggtcacaaatacgggcatccataacgtcacactcagccacaatcacataatcgcctgcaagcagcacacagtcacagctttccatggtgatgaccacttttgttgcacgcaatcccgggacctcagggacaggaactgcagatacctgcagtcatatacaatgccaagtcaccacacacagccaaacacacagtgaacacccccagtgctacatgcattcacccacacagctgtggagccacacacaatcttaaatgcacacacaatcacaaaaccacacacacagcctcaaagggtcagtgccacctgccgcacagtcacctgatatgggaaaaggcatccccctccccgacacacaccgtggcagtcacagggccacatacgatcgcacaaccacaagtacagacagagactcacattcacccggtcccggagtcatgcccaggctcacacagttccccaggggacaggcgctctagtgccgcagagacagtcctcccaatcccacaaccctcccaccccagagttctggttacctgtgacccccagaagcaaggctgtgatcagagcacagagcacccacatccaggggggtcttgctgtagccatggccgctgcacctggatggggaatgtcagagggttgggaggcccaggcgatccggggagcccttaacccacttcccctccctcccctaccttatttccccaggtagagaggaaccacaaggacgggccaccatcggcactgcgctgagacccaggcactatagaattcagaagataggagtctagcagcctccagacagggcaaggaggggacagagaaagatgtgggtgcaggacgcacagacacctctccttccctgcctgctgagccaccctcaccaggtctcacttgccctgtcccccaggtagggggtgggggatttgctcccagctcagccgcagacttctcaggcctgtgccttcctggccactgcctcctcctgggctctgggcaccgggcctgagttataaccacccactgctccctggggcacattcccgggcaatgaggtgcctatcgggccttagcaatagctcctcctgctccccctatctccacccccagagcaccccccacccagtccggaatgtcactccctacctccctggcccggagaatggggaggggtctccggaagccaggccagccccttccctgcctcccccagccttaaggatctggcttctcaccaactctgggtcactattcttggcgcctggattgcttgctttcttctctgcattttgctcattccaccactgtctgttcaccctcgatactcctctttccatctttgtctctggttttttctcagagtcttcttccatctctctgtggttctccctcggctatctttctgagtctctctcaatatctcgtgtctctctccacccctctctctctttctatccctctcgcctctctgtctctctgtctctgtctctctctctctgtctttttctctgtctgtctctcactcactctctctctctctcctcctgtctgtcttaggagccttgttttgttctccttgggccacaggtgtttctgtctccctgttcctccctgtctttctatgcctctgtgattctttcttttttaaaggttctgaatgatttgtcaaatataccttagagttcttggcccatttattttcctttatttcacttctgctctatttgttgacagcattttttttttagatataactaaggtacaacaaactgcttgttcgtttgtttatttatttatttgagacagagtcttgctctgtcgcccaggctggagggcggtgatgtgatctcggcccactgcaacctccgcctccagggttcaagtgactctcgtgcctcagcctccagcatagctgggattacaggtgtgccccacgacacccggctgatttttttttttttttttttttttttagtaaagacagagtttcaccatgttggccaggctggtctcaaactcctggcctcaagtgattcacccacctctgcctcccaaagtgctggaattacaggcatgagccacggtgcctggcccaaactgcatatttaaagggtagagtctgatggctttaggtacttgtcacatcagcatagtcaagaagatgatcatggccgggcgcggtggctcacgcctgtaatcccagcactttgggaggccgaggcgggcggatcacgaggtcaggagatcgaggccatcccggctaaaacggtgaaaccccgtctctactaaaaatacaaaaaaattagccgggcgtagtggcgggcgcctgtagtcccagctacttgggaggctgaggcaggagaatggcgtgaacccgggaggcggagcttgcagtgagccgagatcccgccactgcactccagcctgggcgacagagcgagactccgtctcaaaaaaaaaaaaaaaaaaaaaaaaaaaagaagatgatcatagacaccaccctgaaaactgtgcttctgcccctttgcgtgtatctgggactctgttaatctctctttctttacacctctgtgtctccatttgtgtctttctctatcttctcttttctctctgactctgtgtgtccctgtgtcccaggctctctgtgtgttctctctgtgtttctgtagttgtgttattctgtctctctctctctctctctttcttccccaccccttcctccttccctgtctttctgcctccctctccctgcattttaggcaggggagactcaagccactttgcagagggagctctcaactccttctcttgccttcactctgggcccaggccgtggagcacaaagaggcagggacccagtctgggaatctgcaggtgccgtggcccggctggtgtggccaggcatgggtgagagagttgggcagggctacttgttattgggaaaatagatcaagaggccaggagaggggcagacggcttgggaaatgggcattgggtggggaacccgaaaggtggcttctccctctccactcctgagccatctgaggccacctctcctgacctcgtctctacgccagcttttctttccatctgccgccagctctttgcatctgtcttcgtgtctccttgtctctgtcctcactaggaagcaagagctaatgaaacattcatctgtgatgtgccagacacaggtgtctgtgaacaatcagactcaggtgtccgtgaacaaaatgacaaagacgcctgaagatgctgccttctttgagccctcattccttgagggcaaaaaaacaaccgagctgtgttgctcacatctataattctgttaaaggggagattttagagcactcaggactggttttagtgcacagggaaaataccaaaaaacccaaaataacaaaaacctattctgaggtttattttgattatgacaattaatatttcattcattaaagtgacaaaaccgtggccgggcgcagtgtctcacccctgtaatcccagcactttgggaggccaaggcaggtggatcacaaggtcaggagttcgacaccagcctggccaacatggtgaaaccctgtctctactaaaaatacaaaaattagccaggcgtggtggcgggtgcctgtaatcccagctactcaggaggctgaggcaggagaatcgcttgaacttgggaggtggaggttgcattgagctgagatcacgccactgcagtccagcctgggtgacaagagcgaaactccatctcaaaataaataaattaattaattaataaagtgacaaaaccagcaacctatttcttccttagtcttttaagttgtttgcaacccattttggtctagataaatcttttttttctttctttcttttagacatcagttgcttttaagttttttttttttttttttttttttttttttgagatggagtctcactctgtctcccaggctgggtgcagtggtgcgatcttggctcaccgcaacctccgcctcctgggttcaaacgattctcctgtctcagcctccttcctgtgtagctgggactacaggaggcacaccggctaattatttttttgtatttttagtagagacggggtttcaccgtgttagccaggatggtctccatctcctgacctcgtgatccgcccgcctcagcctcccaaagtgctaggattacaggtgtgagccaccgcacccggcctatggggtcctcataataatgcttggtcctattcacaaactaagttaattaaacaccttcagacattttaaactacatttctaaaaccaacatattcaatctcttctggaagtcccttgatttttaggcaccacttccaaagcattgaagtgagtttgtacatctgagtgtattacactcataaatatgacccatgttgcattctttcagatatcccaatgctggatattaacttggcgtaactccatcttaaaaaaatcacagctcaattattacacatttaaagctgaagtcacaaggctttccctataacaggtgaaattctcttagacacacaagcacctaaaataccaaaagtgtagagattctgcttcaaaaaaataaaattcataagaagggttggatgtctaaacattttaatgctcagttccaaaacatctcagaattacaagaagacttcagcacagaagagtggttaggagcccaaactgtggaaccagcccctagcatttaaattctggtgtagccatctactagctgtgaggctttgatcacaccatggaccccctctgtgccttggtttccctgtctgtaaaatgggaacaataatggtatccacctcacaggcttgtgatgaggatcaaatgagttaatatatgtaaggcacttagaatagtacctggtaagtgctaatcagtatattttaaattattattattactgttgtcatgactatcattattcttattatccattcagaaagtcaatttctttctgaatggctcacgcctgctatcccaacattttgggattctgagattcatggatcacttgaggtcggaagtttgagaccagcctggtcaacacggtgaaaccctgtctgtactaaaaaaaaaaaaaaaaaaaaaaaaaaaaaaaaaaaaaaaaaaaattaactgggtgtgctggcacacagctgtaatcccagctacttcagaggctgaggcaggagaactgcttgagcccgggaggcagaggttgcagtgagccgagatcgtgccattgcactccaccctgggtgacagagtgagactctgagactctgtctcaaaaagaaaaaaagaaagtcaattttctctcaattaactgcagctgattttggtctggaccgtcattggctgggttcctcttggtgaccctggtgaatttcacggcttttccggagaaggttgctcaaggggggcccaggtcattcacatgacttcataattccatcaagtcacaaagtcagccacttccttccatcacgtccccatgatagaatgttgcatttctctgattcttaaggcaaagatcatagggtctttctaaagcccagatccgaccacgtccttccttttctccaggccctcgggatcaggtccaagttcttctgcctggcgctcagtggcatcatcttccgctgacctacatttccagccatatcattcatttctcccacctcaaacgccagcctccaccatccaggacgattcacaggtgtcctcacacccccaggattgtctacatgttgttccttctgtgagaatgccacccacccgaacttctccaaagggtgacctcatatccagccttcctttccacccctcctgggcccagccccacctcaactctcatcttctctccctgcatcatcacctcaacctcctccccagccccagcctccagggtctcccctctggttcatcctgcacatggccctagggctgccccagctcacagactttccatggctccccagtgccctcaggagaaggtttcagcctctcatgctggcatctgagatccttggggatctgatccctgccctcctctcccatcaccgttacccatgcatggtggtcttcctaccctcccaccttcctggtttggctgtgacaaaagtttaggctgggcgcggtggctcacacctgtaatcccagcactttgggaggccgaggtgggtggatcatgaggtcaggagttcgagaccagcctggccaacatgttgacaccccgtctctactaaaaatacaaaaactagccgggcatggtggcacgtacctgtaatcccagctactcaggaggctgagggaggagaatcgcttgaacccgggaggcgaaggttgcagtgagccgagatggcgccactgcactccagcttgggtgacagagcaagactccatcttggggagggaaaaaaaaatttaggggcaaaagccatctttgaggtatagcacaaggtggaggcatcaagagtgccttcctggaggggaggaaaaatcaaattggctgtaaaggagaactgagaatatctagatttcagaaaggtggacgtcaaatcaaagcaaaaagccccactcataataaaattcattctttattgagtgcatggtggcccaggtgctattccatgtatgtcataggtgtgaaaccttaaatctttccaacagccactgccttatggagactgtatcatccttatcttcatcttacaggtgagaaatctgcagtgaagaaaggtacatcccaaggggacaccgacagtaagcagcggagctgggattccagacacgtggctgggcctctgcaggaagaaatcaaacgtgtggaagggttggggagaggagatgcctagaagggattttcctgtattctcttagtggtgggggtaagaccgaggacccaagtcctcactcatcacgtcctccccagtgatgcaaggatggagctggggtaaaaccagggagaatcaggaccctcacgtcgctgcgtttattaagcatcagggtcagagctgggcaggagaggaggggaggcaaggtctaggtgagagacgttctggaaccagccagtggggtggtaggtcgggaggtagatgtcacatgtcagggtcacttggcctgaatggttttttggatccagttcgtgtatctgcagacgttggtgtagactcctggcttctcctttgatccacaggggatgttaccccatgacacaaggcctcggaggtggtctccacataccagcggacccccagaatcaccctgcaggaaagagggagaaagtcagatacagatagaaacccagagactgtgtgtgtgtgtgtgtgtgtgtgtgtgtgtgtgtgtgtgtgtgtgacagagagagaggtagaaagggacagaggtacttactgaaagatggagagaaagactcagggacagagagacagagagagagacagtaagacacacaaaggcacagagagagaatggtagagagagaataaaggagactcaaagacacagagataggaatgccaagatgcagaggaacatagagagcaagaaagagaaacaatttaagaatggagactgagaggtgtggagagaggcagaggtgtagagaccgatggagagagaggaggaggaagaggagaaggaggaggaagaggagaaggagaggaggaagaggaggaggaagaggaggaggaggaagaggaggaggaagaggagaaggaggaggaggaggaagaggaggaggaagaggagaaggaggaggaggaagaggaggaggaagaggagaagaaggaggaagaagaggaggaggaagaggaggaggaggaagaggaggaggaggaagaggaggaggagaaggaagaggaggagaagaggaggaaaaggaggaggaggaaaagggggaggaggaagaggaggaggaggaagaggagaacgaggaggaggaagaggagaaggaagaggagaaggaggaggaggagggggaagacgaggaggaggagggagaggaggggggaggaggagggggaggaggagggggaggaggatggggagggggaggaggatggagagggggaggaggatggggagggggaggagggggaggaggagacgataagacccaggtgggagaggtagggagggcccagggagagatatgcctggcactattctgtccagggacacctctccacctcgtgtcttgaggacagtctcgcccacctgccctttctttgcgtccaacttgctatgtatcgctttccctgtctctgtccctgtttctgcctgtgtctccgtttctgcctgtgtctcccccttggttggtctctgcacatccctcagtgcattagtcattctggcataaagaggagagcctggatggatgacaatggaggaaacccaagttaaagtattcgggagggagtcccctttccccagctagtgtctccctcctccagagcctggtcgtttctgagcaggactcgtgggggctctgtttgaggaaggacagtcccctcacaccatctgcttccttactacttctctttggttctttttgtttttagacagagtctggctctgtccccaggctggagtgcagtggcgtgatctcagctcactgcagcctctgcctcctgggtttaagcaattctccagcctcagcctcccgagtagctgggactacaggtgtgtcccaccatgcttgcgtaatttttgttttttggtttttttttgagacggaatcttgctctgttgccaggctggagtgcagtagcatgatctcgactcactgcaacaacctccgcctccaggttcaagtgattctcctgccacagcctcctgagtagctgggactacaggcgcctgccaccacgcccagctaatttttgtatttttagtagagatgaggtttccccatatcggccaggctggtctcaatctcttgacctggttattcacccacctcggcctcccaaggtgctgggattacaggcatgagccactgtgcccatcctaatttttgtatttttagtagagatagggtttcaccatgttgatcaggctggtctcgaactcctgaccccaggtgatcctcctgcttcggcctcccaaggtgctgggattacaggcatgagccactgtgcccatcctaatttttgtatttttagtagagatagggtttcaccatgttgatcaggctggtctcgaactcctgaccccaggtgatcctcctgcttcggcctcccaaggtgctgggattacaggcatgagccactgtgcccatcctaatttttgtatttttagtagagatagggtttcaccatgttgatcaggctggtctcgaactcctgaccctaggtgatcctcctgcttcggcctcccaaagtgccgggattacaggcatgagccgctgctcctggcctctctggttcttgatcccgcggcctccatccttgtctctgcacttcctgtctctgctggctgtgtctttatatctctgcatatccctgactgtgtctctgtgtgttgaactaagtctcttcttttcaaggcttgggttctccctcagcctgtctctatctgtctctgtaaagctctcttttggcctgtgtctctctcttcctgtgtctggccatgtttttgtgacttcgtcctgtccctggctgtgtaagtggcagatccgggtcacctcacctggcaggaatccttcccgtacttctcatccccagcacacaacatgttctgggtgatctggccagggtaggcatgctcacactcctcacgggacaccaggtggatgtatgcacactggatggtgtcagggaaatcacctgttaggggagagatgggccagactcagcccaggccttgcactcccctcatcctccccagtcaccccccaacccctataagtcctccatcctctattggtccctcttttctattggcacccctcttcctgtttgtctctcattcttacatctcattaccatcgtccctgcctcctaattggtccctctttctatcattcttcccccccattggctgtcttcctcattaatagtctcttctccaggagtcctcatttcctattggttttccttttctcttaggtccctcctccacttttctctcttccactggtcccaccttcttcagtagtttcagttgacctggaggactcttcctctgttacgccctcctctactgtacccctcctgatcagtagtccattcttcattggacacttcctgcccattgattcatcttgattggtcactctgtgaccattggtcttttcctaactggccatgccctctcccattggttcttcctttctattggttcttcatccaatggtccacctccatcattggtccttttctaactgtccccaccctccctcatggatcctccctttctattggcccttcctccaatggtctaccttcctcattggtcctttcctaactggccctgccctccctcattggctctctcttcctattggtctgcttccctccttggtccttttctaactggcctcaccatcccccactggctctcccttcctattagcccttcatccaatggtccacctccctcattggtccttttctaacttgccgcatcctcccccattgtctctgccttcccactggcccttcatccaatggttcacctttcttattggcccttcacacacaggcccaccttcatggatcctgctgatctattggacctgttttttcctctagtgactcctctggaccattgatcctttccccttagtccctcttccatcagctatacccccattcactgtctcaattcacatccttcagttggcttttgtgctttattggtttctcttcttccatcagttccttctccattattccttcctgctgttcaatgaatcctgatcagtcccctttgacctttgacatccttcctgattagcatctccccactgaccttccctctttattgaaccttcatcttatgttccatctctcccatgctattcacccattggtctacattttccattggctgttcactcactggcccagctcccaaattcactctccctcccccttgacctttctcccattgaaaccctgtcccattggtcctcaccattagcccatcttcccatggcccctcaccaattttcccactccccatcctttggcacacttccccaagtagccagtagcctgctccccaccagcctcccactactgaccatctgctgtcttgccccagcccaggatgtggcagctggtggtgttggctgagcagtccctctccaggggaaggggctggatgagttcagagagtttggctgggcgtgccaggcgcaacagcatgatgtcctggtcatggctggcggcatcatagtcagggtggatcacagcccggacaacagaactctgctcctgggaactctccctttgccgaaggttatgcttccccaggaagacctgaagattcctgggaaggaagagggctgggtctcacctggagcccttgggctgcagttgaggcttcagagagggctgggaagtcatgaatcgctggcctgctcctcccacagtcttccccagctgggtaaatggcaattccatcctttcagaataatcttgggggctattcttcactctctttatttcatgccctacatccaagctgtccagaattccttttgcctctctgaagcatatccagaatctggccacatctcacctttcccacggctaccatcttggtttgagctgccttttcacttcctacctgaactagagcagtagcctcctcactgggctccctgctctgtctctggtcccccacagtccatcctccacaaagcaaccagagatattttaacaatgtaagttggtcctgtgcctcctctgctcagcccctcctatgactcccatctcactcagaatcaaagccaaagttctcaacgtggcacaccaggccttgcaagcactgccccatcatctcacagacatcttctcctcccactctccccttctctccctctgctccagccaaacgctggcttccctgtcttgccttgaacacaatagtgatcttcccacctcagggcctttgcactgctgttccctctgccagcaagtctgtcctccaagtatctgcatagctcactccctcacttcctttaaatgtcgcctctcagggaagccttccttagttgcccaattaaaatacaaatacctgttagtaggcaattcctatctccctcccctgctttctgttccaccagagaacctatcacaatcatccgacctgctatatatttattgttaaatatttactcattgtgttatttctcctccttgcagagcaatgctgtccactaaatgctacgatgccatgatctcgatctgcactgtccagaggtggctgggggaaccacaagctacaggtggctgctgagtacttgaaatgtggcttgtggattttccatttcattaatttcaatgtaatttgctatatgtggctgatggctaccatattagacagtgcagctctaggatgtcaagatggggatttttgttctattcagatatagtatctccagtgcgttgatcagcacctggcacaggataggtgtttgatacatattcctgaaacagagagtcactcccttgctcagacatcacccatggctccccattgtcctaagaataaagcctgggctcctccacttggcactggagcccctgtgtgatctggctgtagtcactttccaaccttatctcccagcaccttctgccccccagtgaacgggaaattttattttctgagaatactcaagacggttctcacctcaggggtgttatcacagcctttcctctgccctgaacattccttttcccatcttcatgcctccgcttggattttatctcattagaaagtccttcctgaccctcctccatctaaagtaggtacccgtattcttttccttcataatttgtaattatatggggttttgaagggtttgcttcttttgtttgtttgtttttttgagacagggtctcgctctgtcacccaggctggatctgcagtggtgttctgtagatcacagctcactgcagctttgtactcctgggctcgagtgatccacccgcctcggcctcccaaagtgctgggattacaggcatgagccaccacggccagcccaatttgctgcttctttctttcctttttttttttttagacagagtctcgctctgtggttcaggctggagtgcagtggcgcgatctcggctcactgcaacctccgcctcccacgttcaagcaattctcctgccttagcctcccaagttgctggaattacagaagcccaccaccacgcctggctaattttttgtattttcagtagagacagggttgagccatgttggccaagctggtctcgaactcaggtaatccacccacctcggcctcccaaagtgctgggattacaggcgtgagccaccatgcccagccctcactttgcttgtctgcacctttctgtccttgtgctcccgagggcagggatgacgtgtgtgtcccatccattgctgaatctccactgcccaactcgaatgtggcacttagcaggtgctcttagtcaatgtacatcaaaggaatgaatgatggtggtgagagtcatccaaggtctccttggggtcaggggaaccaccccagggattgtcacttgctatttccctgcacctcagtttcctcatttgcaaaatggtgccaagagtcccttgtggtgggcattccaggaaaggtgtgtacatggtttcactcagcacctgattggtagttagcatcaaacaagtggcagctgtcgtgaatctgactagtgaggatcagcgcccagggtttttgtcctgggccctccagctcctccaactatgccagctttttggatgatctcatctagtcccatggctttaaatacacctgtttgctgacgatgccttcattttaacctccagccctgacctctcctctgagctccagagtcctccctggcctccctgctgggacatctccccggcatctccaactcatcgtggctaaagcaaaatgtcagatgctcccctgcctacacccggcctgtttctctttccctctcccacaactcagagaaagacgtggcaaaacacccagttgttcaggacaaatacacggaagccagccgtgcttcttcctctccctcctgttcctcgttgccagattctgctggctcagtctcagaattccacatcccaagatattcaacatccctccatccccactgcgaccgcctgggttcaagccaccctcctatgtcgccggatgaaagcaacagcccccacgtgggcctccctccctctctcttgcccagaccacgttccacgtggtagccagggtgcttgtaaaaatgtaaatcaggctgggtgtggtggtggctcatgcctgtaatcccagctctttgggagggcgaggcgggcggatcacctgaggtcaggagttcgagaccagcctggccaacatggtgaaaccccgtctctaccaaacatacaaaaattagccaggcaaggtggtgcacacctgtaatctcagctacttggggtgctgaggcaggagaatcgctggaacctgggaggcagaggttgcagtgagctgagatcatgccactacactccagcctgggtgacagagcgagactgtgtctcaaaaaacaaacaaacaacaaaaacaaaactgcccagtggcttcctactgtgctcagaattaaatccaaatgcccatcacgccctgcaggtccccaaatgatccaattcccccattagaaagtaagttcaggaaaacagcaattttgcttgtttttttttgttttcttttttttattttcttttccactgctatgcccgcagggcctggcacacattaagtactcaattaagcaacagccgaatgcacctggctatcagatggcctcgtgctgggatgggggggatgcctatgtcacctcctgcctgacatctataagacaccctcagggttcagtcgcatctgctgttcatttacagtgtagactcacggttttttgcagtgggcagctgtgaggacccacagtggatggataaggaccccaccacagagcaagtggcccgaggtgtagagggcagcttggtaggggtgagatgtcttgtcgcagggtccgccatgcaccaacttattctgctcctctgcccaggctgagggagagaagatctgagtcagagaggagttctggagaaaccaagcgcatccccctcaacatgaactccagtcaagattggtcaggtgcagtggcttatgcctgtaatcccagctgaggcaggaggatcgcttgagcccaggagtttgagaccagcctcggtaacacagtgagacctcatctccacacacacacacacacacacacacacacacacacacacaaattagcagggtatggtggcatacgcctgtagtcccagctacttgggaggctgaggtgggagggtcacttgagacccaagagttcaagtctgcagtgaactatggatcatgccactacactccagcctgggtgacagagtgagaccctgtctcaaaaaaaaaaagcttctctgtatttccactcccaaacttaccccattcccattacaaacccaactgtatcccctattcccgggctctctccaactttccaacctacctcctacctcttctatgtttagatccccatccctaaagccaaccccaccccaaaccctcatatcttcaaacccacctcccaccaccctccctatctgtattccccacccttagcctaatccccaacgtcttcctcatttcaaagctcccccaccccaaccctgtgcatatccccatccccaataccagcctcttctccatcaacaagcccaaccctgtctgcaagcctcccccatccaaatgccctttccccacctgcagcaatcagactcagcaccaccatcagcttcttcatggccgctcctgagaggggaagccacatggtccattagtcactgcctcgaccctccccccatccctctgtctgctccctctgcatcctctccttccttcctggcctgctatggtctcctgccttgacctctgtccttcccatctagcctcctgatttattcttcctcagcccacatcttccatcagaggatcccacgaaaacagtgccaaagagaattcagaactacgtccactggtccagtaacccatggtgagattctgattagatctttctactttcttgggcactgatttgccttcctgtcgacaggagagggttaccctagggggccctagcgttcttcctctgtatgggagttttcctcggagcctggctctgtgcgcaatggccacccaccccgcccacccggcaggttctgtgatgtctgtgatctcacctgctgcaggcctccgggctccggggattcttgagtcgggggaaggaacagctttgagacgaggaggcagaaagagttagaaatgcggggagccgtgaggagagaagacactcagatgcagtggcagagccaagcggaggacgcaggggccgcagagcccagggctgcagggactgccagacacacacccccagctcccaggcctccctggaagaggctggttctgtccccagatgcttctggaacgtccttttaacccctgtctctcaggtccctgagccaggagactggctacacccttttcctccttacccaggcctcccacacacattcctcccgcccccacgctctgctcttggtgacccctgaccaggcctccagggaagggagcactggtccctgagtgcagtgagggcctggactcctgggtctgagggaggaggggcttgggggcctggactcctgagtctgagggaggaggggctgggggcctggacccttgcgtctgagggaggaggggcttggggcctggactcctgggtctgagggaggaggtgagaacttggactcctgggtctgagggaggaggggctgggggcctggactcctgagtctgagggaggaggtgggaacttggactcctgggtctgagggaggaggggctaggacctaaactcctgggtctgagggaggaggggctggggcctgaatctgaggcagaggaagttctagtcggctcagtccttagacctccgggttttggagaaagaaagtgtctgaagacaaattccggcctctggggcaagcagatggtgccccaggcctccctgcacccccagcactctctgtgccacccagggacctgcaggccctcactccgggctctagagccctccggcactgggaagcagcctgcccaggttcagtgcggttggggtgactcacacacctgcccgtaggtccctctgtgtgctgcctgccgacctctgtgtccccaggagagagcgagccagccagccggggagacagctacagcgtgtgtcaccacactggcccccgcccctgccccgggctggggagcaggcccaggcgcgatggggaaagggcccaggaacaatcgggctttgtccgcccccagcaccccagtgccatgctcccagcagctccggcctcaacctctcttccggcgggcaggcgggagggcggttacatcaatggcttccttttgtccctgtctgacagtcctcctttgcagtctctgactgcccacctggccctgactggagatttcggcactccacatcctcctggtccttctcctccaagtctgcccacccctgaggtctcttgctccatctgtctccctggccatggaggggagggagcttccatctctctctctctcccatctcagtctctgtatttgtgtctctctccctctttttttctctctctcccttcctctctcccttcctctctcccttcctcccttccttccttccttctttctttccttccttcttttctttctttctttctttttttttgacggagtcttgctctgtcactcaggctggagtgcagtggtgtgatctcagttcactgcaacctccgcctcctgagttcaagcagttctcctgcctcagcttcccaagtagctgggattacaggcacccaccaccacgcccggctaaatgttttttgtatttttagtagggaagaggtttcaccatgttggccaggctggtctcaaactcctgacctcaggtgatccacccaccttggcctcccaaagtgctggattacaggtgtgagccactgtgcccggcctctctccctttctttccccttgattctctgactctccgtgcttatcttctcctgggtctcttcttagatttccccgggggtagcactgtgtgtgcccagaagggagtcagtttccccaggaagtagcggggatgattcccgagcgatgaggaagctagcaggatggaagaggacttgaggacttattgatgagatgcggacacacagcgagaggcatggagttaagcagaaatcggagagcacttgggaacgacgtggggctgtgataagatggtggtgctgggcagtagcagagggatctgggaagatttagggaggtgtctttgaacttgggcctagaaagctgagccaggcgtaggtcaggaggaaaggccgtgaaaatgcctggcctgggtgcacatgggaaaccacaggcagtggttggggtggttggtatgggctggagggtgagggtgtgtgcgtggcagagtggagagaaatgaggagggggaagtcactgcgtaataaggacaatgataggaatgaagtctggctcagcacctgcttgggctgggcactacaggtaacttaaaaaaaaaagttcttttttcttttgagacaaggtcttgttctgtcgcctaggctggagtgcagtggcacgatccttgctcgtggcagcctcaaccctcctgggctcaagcgaccctcccgcctcagtcttcccaggagctgggaccataggcatgagccactgttcccagccaacccttttctttgtcttgcattgaatctaattgtcatcttgcattgtgcaccccccatcactccagggatgaagactacttcggtattcagtatactctccgggtgctccctctcacatttggtccccactgacctcagcaccttcttctcaggacgtgctatcttcacagacagcaagtctgatgttgcacaacccagtgaccaggccctatccctctgcctcctctctctggggggtcccttcctctctgtacccacaccctcaaccccaactcagagctgcacctctcccacctggaccaggatccctctgttctctgtatcccttgccccagagagaccttcctgtgccttgtgctgaccttgcccctcctctcacagacgtgccctgggtccccatctcccttgggaccaagtcccagccccccagcctggcatttgaggacctttagcatccagggaagtcctggccaatgaaatgtgatgccaagcacgcatgcacatttacattttccaatcaccatacttttttttttaagtcagaagattttttaagtgtccttaccacaaaaaataagggtgtaaaataatgcatatgttaaatagcttggtttagccattccacaacatatacatacatatatcaaacatgatgttatacaccagaaatatatacaatttttacttgtcaattaaaaaataaatttaaggccaggcatggtggctcatgtctgtaatcccagcactttgagaggccaaggtgggtagatagcttgagtccggaagttcatgaccagcctgggcaacatagtgagaaaccatctctgcaaaaagtaaaaaaattagccagatgtggtggtgcacacttgtagtcccagctactccggaggctgaggcgggagaattgctgagcctgggaggtcgagcctgcagtgagctgtgactataccactgcaccccagcctgacatggctgggcaaggtggctcatgcctgtaatccaagcactttgggaggcagaggtgggaagatcacttgagcctaggagttcgagaccagcctggacaatatagtgagaccctatctctaaaaaaaaaaacaaaaaaaagaaaagaaaaaaattacctaggtgtggtggcacacatctgtggtcccagctatgcagaaggctgaggtgggatagttgcttgagcctggaggcccaggttgcagtaagccataatcacgccactgcacttcagtgtgacagagccagaccctgtcaaaaatttttttaaaaggagtcctgagtggtgagtggccctcacactgcatgacacagctatgtctacgtctccgtgtggctccagctttctagaacacatcaagcttccctgacccatgccatgccctctggcctctggcccttcactgaatgctattccctcttcttcttgagatggagtctcgctctgtcgcccaggctggagtgatgtggcgcgatctctcttcgcctgctgggttcaagcaattctccagcctcagcctcccgagtagctgggattacaggcacacaccaccatgcctatatttttagtagagatggggtttcaccatgttggccaggctggtcatgaactcctgacctcaggtgatctgcctgcctcggtctcccaaagtgctgggattacaggcgtgagccaccgtgcctggcctattctctcttcttagcatgttttccccaccttttcctggcaataacctgtccttcaagtctttacttggacattacctcctccaggaaaccttccctgaacaccacccagctgccacctgctgtagttggattactcattctctcacgtaggttcccacagcaggtgtctccctcaacccaacctggacggggggccacctggattgacattcgtcatctcttccactggaccgtgagctccttgagggcaggtacgggactgactcatccctgtgtcccaagcaaccacacaggaccttgcccagaagaagccttaggcaagactgaccaaatgactaaatgactttatcacacccactcccattttacagataagaaaactgaggctcagaacgggaagttcattgctcatcatcaaacatccaggaaatggtggagcctgaatgggaactcagcttccaacatggcgtggatgtggcccatcccttggtggcctggctgggtctatcttatgacagtacgaggtgagtgaacttgggaggaattgttgagagctgggtggggaaagaagggaggtgttaggctgtggggagtggagggactttgaagagaaagaaatttctaactctacctcttctctggtgaccttcatggtttgccatctctgcatactttgaatgcttatttactggatagtttgctccagattgtcttgctctgcaaaactcttcactaaataaattcttctgtctcggtgcagtggttcacacctgtaatcccagcactttggagggctgaggtgggaggattacttgagctcaggaattagagaccagcctggacaacatagtgagaccccgtctctactaaaaaaaaaaaaaaaaatcagcccaggcatggtcccagctactcgaaaggctgaggcaaaaggattgtttgagcccaggagactgaggctgcagtgagctatgatcatgccaccaaactctagcctggatgatagagcaagaccctatgtgaaaaaaagaaaaaaaaaattataaggaaacttcatgagactgtaagcagaaaaaagtgccagaagtcataaacaataaaaaccaatgcctgggccaggcgcggtggctcatgcctgtaatctcagcactttgggaggtcaaggcgggcagattgcctgaggtcaggagtttgaggacagcctggccaacgtggtgaaacttggtctctactgaaaatacaaaaattagccgggcatggtggcaggcacctgtaataccagctactcaggaggctgaggcaggagaatcacttgaacctgggaggcagaggttgcagtgagctgagatcgcgccattgcactccagcctgggtgacaagagcaagactttgtctcaaaaaaaaagaaaaactaaactaaactaaactaaactaaaaccaatgaccattgaaggaaggcttacctcgtgccacacaatgtttgagcactttctgtatattaacttattgaatctctgtaataaccctagaaagtaggtgctttttctcccatttcaaggatgaaggaacagggacaggggaagtaatgagcttaaaggaaaatagcttgtagggactagaactgggatttgaacccaagaagccaagatccagagctagtcccttaactaccacactatactgcttacccaaagaaaaatgaattacttaaaaaaaatcaacattagtaccatctcagtcattgcaaaccaatctacctgtagcttgcgtataggagagcagagggccagggccagggatctccaggctgacttagtgcaaatgcaatgttttgttactttttaaaattccagattgaatgttggagtgccttgcagaagagagagaaaatgttgctaaaacttcaggggaatgactggtcgaaaatgtttgacattcttaaacttgacaggcccagaaacagaaggggctggggacctgggctcctgggtctgagggaggaggggttggggcggggggtctggactcttgggtctgaggaaggaggggctgggggggagcctggactcctgggtctgagggaggaggggttggggcggggggtctggactcctgggtctgaggaaggaggggctgggggggatctggactcctgggcctgagggaggaggggctggggggagtctggattcctgggtctgagggaggaggggctggcggcggggagcggtctgaactcctgggtctgagggaggaggggctggggggagtctggactcctgggtctgaggaaggaggggctgggggcggtctggactcctgggtctgagggaggaggggctggcgggggggggggtctgaactcctgggtctgagggaggaggggctgggggtagtctagactcctgggtctgagggaggaggggctgggggggagtctggactcctgggtctgagggaggaggggctgggggggagtctggattcctgggtctgagggaggaggggctggcaggggggtctgaactcctgggtctgagggaggaggggctggagggagtctggattcctgggtctgagggaggaggggctggtggggggggttctgaactcctgggtctgagggaggaggggctggggggagtctggattcctgggtctgagggaggaggggctcgtgggggcaggcctgcactcctgggtctgagggaggaggggctggggctggtctggactcctgggtctgagggaggaggggctggggggagtctggattcctgggtctgagggaggaggggctggggttctggactcctgggtctgagggaggaggggctggggggagtctggattcctgggtctgagggaggaggggctggggggtctggactcctgggtctgagggaggaggggctgggggcctggactcctgcgttttctgtgttagcctcctatatgggagaatcagaattagcggctgcagaatttctgcaatatgacagggctgtggtgcctgggttaggagagactcagagggagatgagataaggaggggaaggatctggaggatcttggtggggagggaattctgggagaaaaacaggaagaacaggtaggagggcgtgtcctgggctggagtggctcctcggtcagcagcgtctgaggtgtgaccacacagaggatctttgatgttagatggctggggctgtggccaggctctgagtcacagaggactcctccctcatcctacccgcttcccgaggttcctttccctcccttcttggggagcaggtgccaccatcttcctccggcactgtttgcttacttctggcagacccccgtgggacccctgtgtcctgtctactgtcatcccaatccctctgaaaaccgccagcctccctcctcacttgtcactcgtgagatgctcagaaacactttcacaccccttcccacgctgatgaagttggcctgttctctcctccctcctcccttccttcttcctctctccatcctttcctctctctcccattttacagacaggaaaaactgagatctgggaaatggaaatatgccctggaacagggccggcaggaccagggctcaaaaccaggcacatatttctttctagtctcccttcctgaaaggtcacctctctccaatcttagatcttcagacttttttccccacctttatttttcatgttataaaagtgcacattcaaggaaaagtacacagaaggaaggagacacctcatgacgaccccagtatgcagtctgggacatgtgttttcagatctgattctgtgaatatttcattttttatgggtagggtcacatacatatatatttttgtccttccttttgtcatttaacatcctatagcctaaatgttcttgaataatactgacaattctgtctaagtatcatttttaataggtttgtaatatcattgtgggctggccgtggtggctcatgcctgtaatcccagcactttgggaggccaaggtgggtggatcatctgaggtcaggcgttcaagaccatgctggccaacatggtgaaaccctgtctctagtaaaaatacacaaaaaattagcctggtgtggtggtgcacacctgtagtcccaggtacttgggaggctgaagcacgagaatcacttgaacccaggaggcggaggttgcagtgagccaagattgcatcactgcattgcagcccaagcaacagagactctgtctcaaagaaaaaaaacatcgttgtgccaagccagactattatttaagccatctggtacttttggaacatgtttgatggtttcacttcatttctgtgataaataatatcatggtaaattcaagtcttgttctacattttggattttttttgtttcagtaggttcttcctaagattagagttactgggtcaaaggtggtgaataagggtctcggtgtacgttgaccaagtgtcttccgtaaagactgtacgaacgtccagttccagtgtttgagagtgctggtctcactgactcttctccagcactgagggttttgtgtttctttatttgttttggttttaggtctttaccaatttgattggtttatcaacagggcatgaggttggtttaaatatatctttgaggaaaggtaaagtcaaatttgacttcataggtcatcggcgtcctcactcctgtgcattttctgttggaagcacacagttaattaactcagtgtggcgttagcgatgctttttcatggtgtcatttatccacttggtgaacttgcacacttgagtgtagactcctgggtcattgggttggccgcaagggaaagttccccaggacaccagaccttgcagggtacctctgcacaccaacggtccccctgagtcaccctagagggaatagagccggagattaactttggcttcagatcaaagcccaactcattctcatacattcctcagttatcggtctttgtcttgcagattatggacttccaccatagccaatgagaagagactcattgtctctggggactaatgggagagctagtgctagggacacactaggtcctttgaagacactggtttgacccttggccaatgagaccaattgcagagaaggggtggggcttccaggatcagagcactctttattttccaatgttaaggaccctgctccaagctagtgggagaaggaacatcatctccaaggggtggatgcgtgccctgtggcgcaggaaagggggacacgatggtctcggagaccagggtgaagaccagttacataatttacaggacttggtgcaaaacgaaaatgcagggccctttgttcaaaaattattgagaatttcaagacaacagcaggaatgcattagactaagtttgagacccttctgagtgtggggctctgtgtccgtgcagagcttgcacattcatgaaactggccctcaccaggggagaaggggaacaccctattctctaggacagtcatctctctcccatctcctctatccctaacactcaccatcccacatcccctgacagctgaaggtgcagatgtgagcaaggaggatgggtgtggagagacagagagagttggaggtggagaagaaagagggaaaggagagagagacaaagagagatgaggaagagggaaagggtatggggagagagagagacagagagatgggggtggaaaagaaggagggagaagagagacagacaaagagatgagggagatggggagggtgtgggaagagaagagagagagagatgggggtggagaagaaagagggagaagagagagacaaagagaaagggggggaaggtgtggggagagagatggggtgggggtggggagaggagagagagactggaagagaggaggagaataaagagagagaaagaaagacagagatgggggagcggcagggagaggagagagatagaagaaagagaaagagagagacagtaaaaaggagggggcaaggagagatgagggagagagatgaagagagacagagaagtgggggagagagagaaagaggagagggccagagaggagacagagagagaggaaaaaagagagagcaggggggcagggagaggagagagggaggggaggagagagagagaagcaagagaaagagggagaagacagagagcagagaggagggcatggagagagaacaagggagggagagcaagctagctcaacacagagaaaaaacaaagaggaaaagaatgaaatgaaattatgtcacaaagagagatgtgggaagactgttcagaaacagaggggatgacaaaaggccagaaagagggaacagagaggaggtggagagaaagagtgttttccccgggaccagggccagggtcaggtgagtgagtcatcagcttcaggcacaaaatctcagtaactgcaatacacaatacttcaatgcagtacttaacgaaatcaaatgtaatacataaaactgcatgatgggcatggtatccacattttaaatgaagacagtgccagtacagcgctgtgctgagccacgctagtacttacggcaagggaaaattcagtaagatccacctgctctttatttaaaatgtgacattttgtccatcatggacttctgcatgagtttttatttttatttttaaatattgcattatgatttatctcaatcactgaggtttttggtgcccccttaaggtttgggcctgaggccagcacctcagtctccttccctggtcccacccccactttctcacccctattaaactctctgtctcatccccagggccacattggcccctaagtaaactcccacccctgacctaggcagagaatgaggtggaaaaagctgaggaggccaggcctggggggagggcaaggccgggcttggtacccagtcactcgggtcaagctctgtccctggggcatgcagacagggtacccaggactggggaggaattgggggggagggtctcacattgcaggcgtttttcttggagtcggggatgccagcgcacagcatggaattttccagtaagtccttgtaaaccttcgtgcagtcctggggggagatgagcttgacatccacgcacatgaggtcagagggaaaggtcactgcagggaggagcagggagagctgtcagtcagagaggatgggggcgaggaccagaagggctgttgttcaggctcctggttccgagggaggagggtctggggcccaggactgctgggtctgagggaggaggggctggggtctggactcccgggtctgagggaggaggggctgggggcctggactcctgggtctgagggaggaggggctgaggcctggactcctgggtctgagggaggaggggctgggggcctggactcctgggtctgagggaggagggctggggcctgcactcctgggtcactgaggccacctaccatctgggctcgtggtagtgccccagccggagacagtacaggtggttccagggggttcgcagcgggagggcagcctgactttcttcaccatggatgacagcctggcctggctattgagcttcacgagcatgaggtcattaacatgggtctgtgtggagtagccggggtggcggaatgacttcgaggccttgatcctctgagctctcctgtcgcccagcgtatcactgcccaggtgcacggtgtactcactgcgaggagtgacattcacagattcagaagagacactgtgacagagagggtgtgcaaagacctgggggacggggtggggacagagacccagagagaggaggggggacagagacacagagagaggaggggagacagagacccagagagaggggaacagagatccagagagagagggggacagagccccagagagagggagacagagacccagagagggggggacagagacccagagagaggaggggggagagagacacagagataggaggggggacagagacacagagagaggaggggggagagagacacagagagaggagaggggacagagacccagagagaggggaacagagacccagagagagagggggacagagatccagagagagagggacagagacccagagagagagggacagagacccagagagaggggaacagagaccagagagagagggggacagagccccagagagaggaagacagagagccagggagagagggggacagagccccagggagagggggacagagatccagagagagaggagggggaacagagaccagagagagaggggaacagagacccagagagagagggacagagacccacagagagaggagggggaacagagaccagagagagagggtgacagagacccagagagagagggtgacagagacccagagagagagggacagagaccagagagagaggagggggaacagagaccagagagagagggggacagagacccagagagagagggacagagacccagaaagagaggagggggaacagagacccggagagagaaggggacagagacacagaggggaacagagatccagagagaaaggcagacagagacccagagagagggggacagagccccagggagagggggtacagaggcccagggagagggggacagagatccagagagagagggggacagagaccagagagagagggacagagacccagagagagaggagggggaacagagacctagagagaatgggggacagagacacagagagaggggaacagagatccagagagagggggacagagacccagagagagggagacagagagccagggagagagggggacagagccccagggagagggggtacagaggcccagagagaggaggacagagacccagagagaggagaatagagccgtaggcacagaaagactgcccttccacccccatagcgagctggagacgctggtgcacctccagcagagacttgggcggcacctacttcatcttgcagtgggcggcagtgagcacccagcgctcattgaccaggacgcctccgcagtggagctgattgccactgagcagggccacctgccatgggtgggagcctcttgcacatggggcgccatcaataatcttgtcaccctgggctggatggagacatggaggagcacgtgggtagctagcattaggggaaggctgaggctgcacctcagggattcccagagtcagagatggacagagacagatgaaaatgtgtggagaaatacagagaaagcaagagatagggatagagacagacagaaggagcccactcagaaacccaggaggcgcatctcatctggggaaccacagagagaccctgagcacaggaggcagggcctggaggggacagagaccccctgagtcagcagaagcaggaagagcgggggcttcagccgacagtctggtcctcccaggatggaagctgtttgaggagggaagggttctgactcagggactccttggagagggtcagtgggggccctgaggtgaggtcagacttcccagtccagctttcaccttcttctcctgcagtttccaaggctaaggatagcagtaagatctgcaggggcaggagaagggatcttgccatggtgccctgctgagccgctcaggggctgccaggcgaggaagggcctctcctgctggagctgagaaggagaaagcattcaggcccagcccctccccactcagacccaggggtccaggccccagcccctccccccacagacccaggagtccaggccccagcccctcctccctcagacccaggggtccaggccccagcccctcctccctcagacctaggggtccagaaccccagcccctcctccctcagacccagaaattcctttctctggcctctccttccttacactcagaagtccagacccctaacctcctcctccctcatacccaagagtccagaccctagcaccttcctccctcagacccaggagtccaggcccccagcccctcctccctcagacctaggagtccaggcccccagctcctcctccctcagacctaggagtccaggtccaagtccctcctccctcaggctcaggagtccaggccccaacccctcctccctcagacccaggagtccaggcccccagccccgcctccctcagacctaggagtccaggcccccagctcctcctccctcagacctaggagtccaggtccaagtccctcctccctcaggctcaggagtccaggccccaacccctcctccctcagacccaggagtccaggccccagcccctcctccctcagacccaggagtccaggcccccagctcctcctccctcagacccaggagtccaggtcccagtccctcctccctcagacctaggagtccaggtctcagtccctcctccctcaggcccaggagtccaggccccagcccctcctccctcagacccaggagtccaggccccagcccctcctccctcagacccaggagtccaggccccagcccctcctccctcagacccaggagtccaggccccagcccctcctccctcagacccaggagtccaggccccagcccctcctccctcagacccaggagtccaggccccagctcctcctccctcagacctaggagtccaggtcccagcccctcctccctcagacccaggagtccaggcccccagcccctcctccctcagacccaggagtcgagacccccagcccctcctccctcagacccaggagtccaggcccccaggccctcctccctcagacccaggagtccagaaccccagcccctcctccctcagacccaaaattcctgttcttcagatccctagagacccaggaatctaggctccgatcttgcccttccctgtggaacccaaacttctgactctgtagttcgtttttccctaaaaggccccaaattgcagacttccaggccctcactgctcaggaccgggagtctaggctgcagcccctacctctcgagagcagagtcaggcttggagccagcatcaccctctcccctacaggtgcacccttgatgaagcctcttctcacctcgagaggatctgatgtgatccaagttccgacttgggctggcacacagctgggctccaaaatcttcatccctctgctgggccgtcctcttatatcaccccccgccccatgcccggccccagcgccctggggtgcaggcggagccgactctgggacacccccgcctgcatttgcggttctggttatctggaaccctgacgcagcgagagcaattggcaccactgcactctctctccaccctccctccgaaggacgggcggtgcccagctcctgcgcccccgcacattctggtcccacagtccctcctggctgctctcgggggagggacccggtgcgctgggtctgaggggcaggagcgggattcaagcagtcgctgagctcagagaataggctctggctcgggtccttctctggggcggttttctttctttcttccctcctccctccctcccttcctttcttttttttggatggagtctctctctatcgccaggctggagtgcggtggcgcgatctcggctcactgccagctccgcctcccaggttcaagtgattctcctgcctcagcctcccgagtacctgggattacaggcacgcaccaccactcccagctaatttttgtatttttagtagagaccgggtttcactatgttggccagaatggtctcgatctcctgacctcatgatgtgcccgcctcggccccgcaaagtgctgggattacaggcgtgagccactgcgcccggcttctggggccattttcttgccctcaccccctctcaggggtggcctagaccctacatcctaattctggcccgcctgggggaacttgtccaagctgatcccagtcgtgcctgtaattacgcctgaacccattcccaactctaacagagaggtgtaagttaaaaacaacgctttccctaaccccaccccactaatatttgccatgtttaggatctatgttcttatggtcattttaatcatgttatacatagatttctttgtatattatgtatttataacaaaaatgtctgtacttaacattatctaatagaacatttttgagggcttcatttattaatttataagcaaatatttatttttctttttttaacttttcagttcgggggtacatgtgcaggatgtgcaggtttgttgcgtaggtgaacgtgcgccatgggggtttgttatacagattatttaatcacccaggtattaagcctagtacccattagttatttttttctgatcctctccttcctcccactctccaccctctcataagccccagtgtgtgtacccaaaggaatataaatcattctgtttaaagacacatggacacgtacgttcattgtagaactattgacaacagcaaacacagggaatcaacctaaatgtccatcagtgatagactggattaagaaaatgtggtacgtatacacaattgaatactacgtagccataaaaaagaacacgatcatgtcctttgtagggacgtgaatggagctggaggccattacccttacaaactaaagcaggaacagaaaaccagatatggcatgttcctacttacaagtggtagctaaatgatgagactgcatggacacatagaggagagaagaatctttcttatttttttttttttttgatggactctggctctgtcacccaggctggagtgcaatggcacgatctcggctcactgcaacctccactcccccgtgttcaagtgattctcctgcctcagagtcctgagtagctggattacaggcgtgcaccaccatgcccaactaatttttgtatttttagtagagatggggtttcaccatgttggtcaggctgctctccaactcctgacctcaggtgatccaccggcctcggcctcccaaagtactgcgattataggcctgagccaccgcgcccagccaaggatttttgctaaatgagtagattatagctgctcttgccacaggggaggaaaatgggtaactatgtgagatgatggacatgttcatttgttcagctatagtaatcattgtcctatgtatatacatcgcatatgatcatattgtacactttaaatatacacaataacatttattttttaaaaagaggaaaacttttccctctttgtacatttagattacttttccttcctttataatggttgtgtaatattccatactatacttgtatcatgatgcatgtcatctgcctcaaattgaaatacacttggatagttttaattataataatgctgagatgaacttctttgtacattcatctttgttcattgtagtcattcaaacagcatccattgagcatctactctgtgccagaaactattcaggctcttggagacacagcagtgataaaacagagaaaaatttctgtcttcatagaggtttttgttttgtactgtcaggtcagcacaaaaataagcaaataaaatgtagagtttgttaggtggttgtaagcgctataagggaaaatccaagcaaggaagagggttggggagttactgattccctctaccctcgaggatccctgaggttataatatcaggaaggttggctgcaaagaccccacgtgaaggtgatatttgagcaaagtcttgaaggagatggtggagggatccaggtggctgcttgaaggtagtgagttccaggcaaagcgagcaggcaggtgtgttagccaaggagcatatctgaagtgcctcagcagacaaatcactgcgaccaatacagagtgaccaaaggagatgagggcaggtgatgaggccagaaatataacaggactctgatgacatgcggtctgaaaggtctttggcttttattttgagtaagacaggaaccattgttggacacacttctaaagttggaattgacctcaacctctaaattatatccccaaaatgggatttatttctccaccctggacctaaaacttatctcaatcctgaccccaactcaattcttttttttgctttgttttgttttgtttttgtttttgagatggagttttgatcttattgcccaggctggagtgcagtggtgcgatctcagctcactgcaatctccgccttccaggttcaagcaattctcctgactcagcctcccgagtagctgggattacaggcatgtaccatcacacttggctaattttttttttttttttttttagtagagatggggtttctccatgtaggtcaggctggtccctaactcccgacctcaggtgatctgccttcctcagcctcccaaagtgctgggattacatgtgtgagccaccacgcctggcaccccaactcgattctacatttgacccataatagtagacattattgttgtgtccccaggcattcactccttctgcctttctatcagaggctccattttgtttggataatactttatcctcatcaggactataagcctcaatgaaccaagcattgaagccatatttcgtttgcttaattagttggaaaatggacatgtgctgttcttctggccaatgaggaggaggggaagaccactgaggcacttctaggaaagactttctcattttcaaaaagaggcactgaaaggggacttttttcttctgctagatggtgtcttttctggatgcaaattctggaactgtggcagcaccccagggaccacagagggaagtgaccagaggactaagtcaaaacactgcaggtagcccaccagagaggtgaggatcagctgggtctttgatgaagtcactgagctggtgaattaaccaacgatggagcctcttcatgtcatgatttttcagattccccttctgggttagagttgcttggtccttgtagccaaaatcatctttataagacctcaatgttcaatcagaatattgactcagatcccaaatctgatcccaagccacaaatccaaatccgattctaacttgattccatatcttgaagccacataaatcaacaaactcaaccatgcctccagtcttagctctcttcccaaccctcatccccatatcccatttcagcccatatcccattttggccattgttaatgtgaagatgaccaatttaatttttagaatagtcttttttaaaaaaacaaattagtaatttggatcctatagctgactacctctcatctaaatttaattttttcttagtttttcttctatacagtggatttcttattttttagggaaaagttgttgattgtttatgcaatagtttaacaccaatcctttatatatttaacaaatatggattgggtggtagctatctaccaatgaggatacaatggtgtgcaaacctagatagtgtctcttccctcaaggagctgatagtgtcatgtaaaagaaatacagtcaattcataaacaagtgtaaaattacaactacaaggcatgctctgaaagacaggtgcagggtattatgaaggcacttccagaggggttagacccaggaattgactatgagctgagatttgaaagaatattaaactagaagaaatcttctaggaactagaagtagactagaagaaatcttctagtaactagaaatagtaaactagaagaaaatttcttctggtaactagaagaaaatttcttctggtaactagaagaaaatgggaggagaatggggagtgtgttgtgtagagaaaagagcatgtgcaaaggcccaaggcattattgctggagctcggaggccagaggttaactgggaccagataatgacgagctctgtatgtcattgtgagtcttgctttatcctgtggataatgaagaactatttgaaccttagtcagagaaataacataacaagatttgtattttcaaaacatcaacctagctactgtatgaaggctggatttgggtgggatgtgaagatactgggcaaccatgggggaagtcattgttgttgtctagatgagggaagatggtgacttggatacaggtggttgaaaggtggagacgatgttaagtacatgggttcaaaatgcacttaggagagagaatcaacaagccttggtgatggattgaatgaaggttgtgttgaggtagtggaagatgttaagatttcaaagtctgttgctcgatggacagtgatgccattcattgagaagacatggtagatgtggtcaaatggttctgatatgacaagaaaagacctcagaccctgacttcaagcagaaccctaaatccaacctttactttgacacaactcccaacacgtattttgacataagccccagcctttttgtttgtttcaatagctttcggggtacaagtggcttttggttacatggatgtatcgtatagcagtgaagtctgagattttagtgcacccatcacccaagtagtgtatattgtacccaatatttatagtgttttatcccttatcctcttcataccctcccccttctgagtctccagtgtccattataccacttggtacccactgcttagctcccacttacacatgagaacgtaaggcatttggttttccattcctgagttacttcacttagaataatggcttccaactccatccaagttgcttcaaaagacattatttgattctttctatggttgagtagtattccgtggtgcatacacatcacattttctttatccactcatcagttgatgggcacttactttggttccatatctttgcaattgtgaattgtactgcgataaacatacgtgtgtatgtgtctttttgatatagtgacttcttttcctttgggtagatacccagtagtgggattgctggattgaattgtagatctacttttagttctttgagaaatcaccatactgttttccacagaggttgtactactttacattcccaccagcagtgtataagtgttcccttttcatcacatccatgccaacatctattgtttttttgactctttagtaagccccagtcttaaccccaaaccttaatctgtacccaatcctgaacctcaaattctgctttatccttgatgaaccccaatttgtatctcaaccaataacctaaatcttgactgagttcttgactccaaatatcaactcaggctaggatccagacctcaatcaaacttaaccctcctgacccttgaccttaaccctgaaccattagccataagccaaactcaaccttgacctgagcagtgaatgtcaccatagcctgagtatcaagcctgccacgggataattcagacattagtctccattcccatcatattctaggaagcccacattcatatcctcccccatgaacccattccctcacatccaacaccaattctaacactctcaccccatcccacccctattctcatcctcaacccaattgctacctaaaatcccattctcatttccatccccaattcttttcccagttccatttttatttctccagctcaccacacaactttgactcttcattttacaaaaactctaaaataaagtctgccaacgaatatcttgctaacattgatgctatactaactcaactcaagccgagtcccaaaatcttctgagacatttactgtcatcgaatccaaaatcagatccccgaacttggacatctagccctgcccattccacagcagcaatctggtcgtgaagggtgtcaacattcctgacctgggctcccaaatcaaggagaagcagactccagcccagttgacctcacagctccatgattcagcaatctgtatctttccttcctggcttctcaaagacagaaatggtagcaagacttccagtgtattatctactccctgcatcttcatccttagattctctcctccctcagtcctctgcctccttagtatctgttagaaagaggaaggagccaggctactctagagccctgttattcactcctaagtcaccaaaacgtctatcctctgcttttcatcatctatcattctgtaaattatattcctaattatttaacctgattttgttgccaaacactggtcatcacaagcagaggaaatgtgtgtggggttctttttttttttccagcaccccgcccagaccggagaacacaggaggtacttaaataaatactagtctgcaaacttctggcatccacaggtccacaggccttagattcagtcctgccttgatccctgagctgttccaccatgcagtgtgacagaaagaactagaaagaacttggactttcaacccagctttgaatcctggttgcccaccctgtgacttcgggtaagtgacttcatttttctgagtcagactttgcccctccccaaagtggaggagagcaaaacctatttaccgaggcaaatgagaggattaaataaaattatgaatggaaaattgatgggcacataacagccagtgaattaacatgagttccctcagcccatcacccacggaatgaagaagcagctcccattttcccccctacatttagtgtggtgtgtctgtattcctcacattggtccaggtgaggattgtcatccccattttacctttattttttgccgcctgccccatcatccccattttatagatgagaaaatggaggtttaaaaaaggctagatcacttgagcaaagtcacagagctgaggagtcagaagtgtcagaattcagccaggcgtggtggctaaagcctgtaatcccaacactttgggaggccgaagtggatggatcacttgaggtcaggagttcgagaccagcctggcaaacatggtgaaaccccatctctactaaaaatacaaaaaattagtcggatgtggtggcatgtgcctatactcccagctactcaggaggctgagacaggagaatcacttaagccagtaagcagaggttgcagtgagccgaggttgcaccactgcactccagcctgggtgacagggcaagactccatctcaggaaaaaaaaaaaaaaaaaagccagaatttgaacattgggattcaaaggcctatggtatcactactgcacaaatccatactctgagaaggaaatttccttgttacatccacatgtaccctctgagtctcatttggttcaaaacagacttggatcgccctcagcctattaatgatgcatacccccatgtcagagagaggcccatatccaggccccctgtgccctttgcatttagtcctggcacctgttgctaagtgtcatccagacacccagccccatacctccatcgtcctcagacctatgtcctgaacctttgttaaatgactcatcttccaccttatgatcacacctgagaactggcatctgataatcttgccagctatgcctttccctgagggattctgaacactgtgaccctcgtacctcctgactcagcccatgggttctgatggcccattgtttcatacttcctggattctcttcctccttatttctttctttctttcttttttttttttttttttttttttttttttttttgagacagagtctcactctgtcacccaggctggagttcagtggtgcgacctcagctcactgcaacctccaccttccggcagaaccccatttcttttgggggagatgctgccttatttcttatagttctggtgaaactgtcaatcgtagttctccaactccacccacccactgaggcggagaaatgacccaggccaagtcaacaagatcagtgttttctctctggcaacaatgatagattcaaggggtgggcccagttcaaactggaccaattagagttcctccctgggattaatatcaagatgccaggagaaaggagatttttgtttctgttagtagctgctatgttccctccatgcccctccttagtacctaagattgagtaaatcaatccccaagtcttttcaggcttatgttccactggagacattaaagtatctcctggaccagcctaggcaacatggtagagtcctagctctactgaaaaaaaaaaaaaaatggctgggcgtggtggcacatgcctgtggtcccagctactcaggaggctgaggtgggaggatggctgaaacccaggaggtagaaactgccttaagcattgtttgtgcaatgctcactgtactgtaacctgggtgacagagtaagaccttgtctcaaaaaggaaaaaaatctccttggcattggatgatactaagaaagtatcaactgtgtaaggtgtgataatgtaagttggttatgtttaaaacgagtctcttttggaacaaggattggcaaatttttaaaataaagggccagagagtaaatattttagcttatgtggaccaagagagaaaaatggaagatattatgtagatatttaatagcaggaaagaaaataaaatttcacaatttttaattgatgaaattcaaaatgtagtaatgataatttagtacaaattttttgttgctattccttatcaagctcacgcctgtaatcccagcacttttggaggtggaggcaggcagatcacttgaggtcgggagttcaagaccagcctgaccaacatagagaaaccttgtctctactgaaaatacaaaaaattttagccgggcgtgatggtgcatgcttgtaatcccagctactcaggagactgaagcaggagaattgcttgagccagggaggcggaggttgcggtgagccgagatcacgccattgcactccagcctgggcaacaagagcgaaactccatctcaaaaaaaaaaaaaaaaaaaaaaaatttagctcaggagatttggtccaacagctgtaatttgccatcccctgttttaaaaatgcataataaaatatttaagaatgagatgttgtggtgactgagattgcttcaaaatattctggcattagggaagtgtgtggtgggagtataggtgaaacaataattggttttgcattaactttttttttgagatagggtctcactctgttacccaggctggagtgcagtggtacaatcatagctcattgcagtctcaacctctcaggctcaagtgatcctcccacctcagcctcctgagtagctgggaccacagacgcatgccaccatgcccagctaattttttaatcttttgtagagaccagtctccctatgttgcccagactggtcttgaatgcctgggctcaagcaatcctcgtgcctcggcctttcaaagtgctggggttacaggcgtgagccactgcaccggaccttgcattcattatcgaagttggatggtggtatatgaagacacattatgttattctattttgcatgtgtttgaaattttccataataaaaattataaaacaattctttgagttgagatgtcccccccagaaatgcatccctggcatcagaagtttaatgccatgcttgaaagacttcctcaggatttctggtatgggggaactgtcataaagcatcagggagattgatgaatgcaaggtatctcacacacccacgccccttgtggagaattgccttcccatagcactaagtggccatgtttcatatcacatgactccaagtagccactgattggctaagatttggtcacctgactgggatgccatcaaatgattggccattcagtgaccaatgatgtggctgaagaagaaaaggtgagctagatgaatcagattctctttcatgagactattttctaaagatcctagtgaaggaggaggcggggtttaactctggactagattgaagacagctggaacagggaaaaggcaccaaaagcacatctccataagacgtgcacaccagcaccatgacagtttgccactgccatgacaacacccaaaatttatcagcccttttctagaaatttctgaataacccaccccttaatttgcatgtaattgaaaatgggactaaatatgactacagaactggccctgagctgctactttgtgctcaatgcctatggggtagccctgctctgcaaagagcagtacctctgctactgtgcagtactgtttcaagaaaagtcactaacaccactgggttgcccttgaattatttcctggacaaagccaggaaccctccctggctaagctccagttttgggcccacctggcctgcaccactagaagagtgactatatccttgtaataactaccccctccacactcatctttccctaaaacaagttatgttaagcctttgctttaatgaaaactttcccaaatgccctttgcgtcacacttcaatttggacacaccactcatttccttctaccacagcagacaccaccagatggctctaggctgtgagaaagagttctatctggatttttgggagctctcaagatttttgacccgagtggtggtttcatggttgttcatttgtgaatatttaagctgttcatatattttctgcactcttttctatgcatatctcccaatgttttcccttttcttctttttttctttttttttaaataaaaatagagatgaggtcttacattgttgcccaggctggtcttgaactcctgggctcaagtgatcctcccacctcagcctgtgaaagtgctggaattacaagcatgagccaccatacctggcacaattattattattaatttatttgtttatttattttgagaccgagtcttgctcttgtcacccaggctggagtacaatggcatgatccctggctcactgcaacctccgcctcctgggttcaagcgattcttctgcctcagcctcctgagtagctgagtttacagatgcccaccaccacaccctgctaatttttgtatttttagtagagacggggttttgccatgttggccaggctggtctcgaactcctaaccgcaggtgatccatccgcttcggcctcccaaagtgctgaaattacaggcttgagccaccgcacctggccaattattttttaaagggggaaaattttatctccaaagcttgtaaatgctttgctcaggaaaactaaacacaaactctttcaaaactgtctttcacataccagcccactgaatgtttgaagacctttgtatgtattttctcccctgaaataaagctcttacccaagttcttccagaaaacgagggatcactttaggcagtggtgatggccaaagtgaccatgagaacttggtttctgcacatccccacctagtctgccagcaggaacaatcccggatccccatccagccctccccacagggccaaaacagagacaggcaaggaaccagagagttgtgagtttattaagggagatctagtgcttatcctagaatcagcccttgctgcctatgatcttcttgatccagtccaggtagcggcagatgttggtatagacgccaggtttgtcggacctcccacaggggtctgagccccaggatgtgatgccctggagtgcaccatcacacaccagggggcctccagaatcgccctagacagggagaatgagaacagccttgcatctgagatgtccacaacgtcccttttcctgctgtcccagcgttttaccagttctttggcatgattggtcccctgtagccaatgggggtaaaagcattgtcccctgagaccagtcaggacagggcttggggcttccatgtacagacagacatggtgtctaagggtagtggtcaaaacactgacagaagaggggaaagaatgaaatcccagacaggcttggtggctcacacctgcaatcccggcactttgggaggccgaggcggtagatcacttgaagtcaggcgttccagaccagcctggccaacatggtgaatccctgtctctactaaaaatacaaaaactagctgggtgtggtggtgcacacctgtaatcacagctactcgggaggctgaggtgggagaattgcttgaactgggaggcagaggctgcagtgagccaagattgtgccactgcattccagcttgggggacagagcgagaccctgtctcaaaaaaaaaaaaaaaagagttctcgagggtccaatccagggagaagacagtagggattacttggagaggactgagctgaagtttcctctgttcctggccaatagtgaaggcatcattgattgcagttgccaaacataggagaaaggatcaagattcttatggacacacacacacacacacacacacacacacacacacacacacacaccatatccccaagagaccatggctgaaatatttgtggaagagaccactatctctacagaacaatccagagactggctttcatggcagtatcgctgatggaaacgactccatttttggccaatggggaagaaagcattgtatttagggaccagtcattggcaaaggtggtggggcttccaggaagtggacaaagccaggggaaagtgctaggaacaacgaagttgcagttagaagagagagttatatctatgacaaatcccaagagaaagggattggagctcattgaggaagcactgaagtcaatggcaccatttactccagccaactgggaagacaccattgtctcccaaggaaccaatcacaggagaagggaaccagccttgggattctagcccggtctcaaagaaaagtggctgaccaccgggccggtggtaaagtcggcacaaattccacgatgtaatgctgggaaccagagagcaggcaactcgtctaaactctagcctcagactctctccttgctggacatctaccccaccctctatagcccccaactctgcatcccatcctgtagttaagcgttcgaaagaaaacagcagcagcaattcaatgctcctaatccctatgcagtgtgactttcagagagagagtttggcttctctgaacctggctcccaatccgtagagataggggtgaacactccgggtgccaagtctttggggtcactcccttaccacccccacccccatccaagccttgaacctcgagagggcaatgagggatgtgtgaggagaaggatttcagaaattgctcacctggcacgtgtcagcccctttgctgctgcctgcacagaccatgccatctgtgatctgccccgggtaagcatcctcacacttcttctggggaaagatttttacttctgcacagttgagagtgtcaggaaaattctctgagggggaagaggttgtaaggttccctgagagagcagccctttgcctccatccctgtctggatctaaccccctttctttccaggatgtaatgggggagttttccagctgcatgggggaattttctgacactgtgcacaggggacatcacttctcaccacattaaacgaagctgtacttgttgctattgggctttctccatctagagaggggcccttggatctcacgtgttttttcttaccctgagccattttcaaatcaaggggctgggggttacttggaggtgcccctttatgatacctctgaccctctctttccagtcttcctgccctcagacaaccgggtcctcaatctgtgctaaatcctgctccttccaagtgtcacctcctcctggaagccttccctgaccactcgaattaaaaaataccatccctccattactccctatccttttacgctccacaatatttccttacagcactttgcctaatgttttattttatgtgtatttgtttattgtctatttctcccacctagcttgcaactccataacgacaaggactttgtacagtttgctcatggctgtatatccagcgcctgcaacagcacctcaggcatactaggtgctcagtaaataagagttgaattaatgattgaaggtggaattgatcttttttattaacctcttttgaggaatagacttctccaaagcctctttgagggggaaaaacttccatctggcatctctacgtgccaaaagcaatatgctcataatctcatttaatcctcacaacagcgctttgaaggagagatgcattcattcatttcattatttattcatcaggtcatccattcaacaaatatttattgagcatctaccatgtagcaggcaccattctgagcactaggagaacacaatgaagaaaactgatgtaacctgaaccctcacgtagctaaaaaatctattggttaatgattcccattttgcagataaggaaagtgaggctcagagatggaaaggaatttgcccagggagaaagggcagagccatagtttgaactgatctacttgatttgcgagcacgtgtgtttccacagccgcaaactgtctcatccaaagcattcagagcaggagtgaggcaggcagggacctgaatgctgactttgccacttcctggagaagctccttgactctcttaggtgagtcccaatgttttcactgtgaaggaaggcgaggggctctctggattctggagtcccaaagggacagcttcattggaggtccagattttggggtccagagtcaagagggagctaggactgctgggtcctgggagaagaagggcctagactcccgggtctgagggaagaggtgaccagggcccaggtttcctgggttcaagaaggagaaaaaggccaggggcggtggctcatgcttgtaatcccagcactttggtaggccgaggcgggcagatcacttgaggtcaggagttcgagaccagcctggtcaacatggcgaaaccctgtctctacaacaaatacaaaaattagctcgcgtggtggcgggtgcctgtaatcccagctactcgggaggctgaggttcgagaatcgcttaaacccaggaggcagagattgtagtgagctgagattgtgccactgcactccagcctgggcgattgagtgaaactgtgtccccctgcaaaaaaaaaaaaaaaaaaaaaaaaaaaaaaaaaaaaaaaaaggagggaggtgggggagaaggtgcttaggagcctgttttcctgggcctctgagaagtccaaatatcccaagtgtgttaagattatataaaatcctatacaaccaaaggtcccatagggtagtgctctccgccatacaggatgggcttttctggccctgcttaacaatctgctagttggttctttctctcaccactcttgttagtagtcagatcttcgaggcttctcatatgactcctgcttgtgaatctcaacatcatgatcactttcccttctttgtctccctctgggggaccaagctttgccaatagcttgggttccactgggccaaccagctcctcctctccctcccattagtggacaagcccactacctcggggactggtgacagtgccccagcctgagacggtgcacttctggccaggctgggtgcaatgatctgccaggctgatgggcttcactttggaccccagggatgcctggtcacgcagttgaagaagcatcagatcatggttgtggtcctccacatcgctgctgttgtagcaggggtgtgggatggactgaaccacaggtatttcttgctctgggccatctttattctgtaggctgtggtctcccaggcgtactgtgtatttcctgtaatggtggggatagtttgggacccaggcaggggtattgcccccagccccctcctccttcagacccaggagtccagtcctcagctctctccttcctgagtcgaaaccccagccccctctttccttaagccccagctgacctctgcccccatcatccactcacggttttttacagtgggcagctgtaaggacccagttgccacctacaaggacaccgccacagagtagttgctggccctggaacaaggccgcctgccaaggctgcgaatggggttggcactcatgaccccccagcaccttgtcctcctgtgccctggagtgtcctgcagcaggagggagagggttggatcgccaccctctggggcagtgcgagggctgggaaggccactgtgggttcaaatggacacacggcaagttctccgcatacaacttagtgaggaggtccaggcttccacacgctgccacacggggacactcatttcagtccatgtgtcatcatacaagagtcacacacccaagaatgcccccacatgcttccacatgagtctacaggccccgagtactcccaggtgaatctatgcccccaagcaagcagcccccaaaggctgtagctattcagacaatttacagcatcacggaacctactcctacctgctgctacctgtttcttgcctctgtccaccctgaggaaagcccacagaggctcctgcaccgtatcgcactcttcacatccgtgcacacgcacccacataacccccgcggcattcccacagactccccagcgccactgctgccttcagatccctcccctccggaggcctccgcaaccctcctcacctgcccaggctccccccagcaagagcaggaacatccacgtcttggccgcacgaggtcgggggcgtcccatggtgaggtctgggaaatggagagggcggggccggtaaacaggaaggaggagcctgagctcccagttctggatttgggcactggggaggcagccgagagtatctggggctgttctgggcttctctggaggaaggaggaggctgggggactggattcctacattccaagggaggggggagtcctcgatgtctgggtctgaggggacagggagctgggagctgggactcctaaattagggagaggaggaagccggggtccagactgctggatctcgacagagaagggcatctgaggctggggtcctggaatctggagaaggagggtccggggcctgatgtctgtatctgagtacctctgcacctcaccttccagaatccaggggcggggtcacctactgattcggacccagtggaggaggccccagtacttcagttctctgcctggtacacgattctggagccttttaactgggaatctccacctcctgctcctcctccttctcctcctgcactagagcctggggagcttctgggaactggaacactgggtgtgagtgagaaggggcggaggggattgaacgtgaaatcttgagggaggaggggctggaatctcagactcctgaggctagggagaggagggactcggtgctgagactctacgatctgaaacataaagggctgggggccaagattttagttctgagaggggaggaggctgggggcctggattcctgggtctgagggaggagaggctgggggcctggactcctaaatctaagggaggagggactgggacctgggatttaggtctgaccgaggaggggctgggggcccagactcctgggtctgagggaggagggggctgctaggggccaggactcctgggtctgagggaggaggggctaggggcctggattcctgggtgtgagggaggagagagctgggggctgaattctaagtacttttaaaaggagaagcttggaacctgatcttttgtgggaggagggggctgctgccagtaaccgggaaccgaagaaaggcaggtcttctagggtcagaaaccagagggtggatcaggccccgcccgctgtcccctgagaggtccgggatctgggagggcaggtttgggaggcactgtgacctggtttccccttcccctggaggcggcaagaccaacccaagcagaacccaggagtcttgctgcaatagggctgatggacagagactttaggcaaaacttactaggggtttaagggggagttgcaaggcggtaccggttccctcatctgcccttcaccgcccacccgtttgctctccactcatctcacagctcaggcagaaagaaggtgaggtttcccgcgtttactgaaaaatcatccgttgcattggctctaaaggtatccagaccctccctcaatttccccccaggtctccgccaggattcaaacccagcacacgcccaggacggggccacaaggggctgagctctacaccgcccgagctccacgtgggcggagctactgcgcccctgacatcacgaggggcgagatctctggtgaaggaggcggggccacaaggggtggagtcccgaggggaagtcccactgggcaaagttccgaggggcggagctattttgtgtaagtggttccttggggcggagccacaggctgtgctgttccaagaaggaggtgatggctgtcggtgacgtcatagagacgggctctgaagggcgtgtccctgctccgttccgagggggcgcgactgtgtcttgcttgacctcgtgagggggcggagcctcaggggcggagtcttagtgtccagaggggagtcagggcagctggaggtccagggcgggaaccattgaggctgggaccctacgagaaccccctaccccgtgcccttcggcctctcttggtcttccaaggtgcccccgtggcgcgcgggctcagttctccatgatttcttggatccagtcaaggtagtggcatacgctggtgtagactgcggggcgccggggtctggagcagggctcagcacccccagacaccacgcctgccaaggttccattgcaaaccagggggcccccagagtcaccctgtacgcgagagaagggcagaggaactgttaggccactctgttcatgacaattacacgggccacttcctccctcccagaaaggccccagccccttcctcctccaacatccgagagtcctccatctccagcctcttcttcctcagacccaggagtaaaagctcagagggcccacctccccgcaggacctaacctcctcctccccgaggactcagactctggacgcccagcccactcctcctgtagatccagaagtctggacctccagaccttttctcttttacactaaggagtccaggccctggtcccgtcctctcccaggaaccaggtatcccagtctccttctcattttgacccaggaaggctgggggccgacccctctgctcccctaaatcctagaaaacttggcaggacagcctcattttccccagagtaaggtctcacctggcaggaacctcggcccccctcccacaggcccgcacagagcatgctgtccgagatgtgtccagggtatgcccagtgacagagtttgttctccaggatgctgatgttggcacactgcagtgtgactggaaacagcgctgtcagggaagagaactgtcaaggatctgcaactgtctccaacacactcagcaccccactgccctgagtcctccctgcagcttttccaaaggaccaatggagccacatttaggactctcaaagatagagacaagagacagtgacagacagacagtcatagcacacaagagaaacaaatggagacaaggaggaagagggccaagtagagagagaggctggccgggcaccgtggctcatgcctgtaatcccagtgttttggaggccgaggccggcggatcgcttgaggtcaggagtttgagaccagcccagccaacatggtgaaaccccatctctgctaaatatacaaaaattagccaggcatggtggcaggcgcctgtaatcccagctactcgggaggctgaggcacgagaatcacttgaacctgggaggtggaggttgcagtgagccgagactggtcactgcactccagcctgggagacagagcaagactccgtctcaaaaaaaaaaaaaaaaaaaaaaaaaaaaaaaaaaaaaagaaaggaaggaagagaaacagaaagatgcatgcagagagccaagagataagaggagatgcatatataactccctagcactttgggaggctgaggcgggcggatcacaaggtcaagagattgagaccatcctggccaacatggtgaaactccgtctctactgaaaatacaaaaaatcagctgggcatgctgttgcacacctgtagtcccagctactcgggaggctgaggcaggaggatcacttaaaacccaggaggtggaggttgcagtgagccgagatcacaccactgcactccagcctgggcaacaagagcaagactcagtctcttaaaaaaaaaaaaaaaagaaatagaaaaagacccagacctcaaggggtggaatgaaggcagtgagataaaaggaaagagatttgcaggaagatggtcactgatggagacagagacatagacagagataccagatacagtgtagtcagtatagatgtggatatggatatataatacacatgtgcatctatataagacatgggtgcaggctccgatgcatcaagggatatgataaacagaattggtaaacagaagtcggggacgggggctgtgcagggagacaggagccatttgggtccattggagtgaatcagagaacttatcttggctgaagggggcagcctccattgactcagcccaatgcttgctattttgggaatgtgagttcttcaaactttttcaggtgaatccagaaacctggcttttgtataaaactttccaagttttagatattggcagcaacaaattcagactgtttttccaatccactgacccaatttggctaatgggtcagtgatccgtgactctgagagacatggtcttattcccattctaagatgaacgcatttcacatttaaacatctctgggccaggtacagtggctcacacttgtaatctcagcactttgggaggccaggagtttgagactagcctggacaacatagcaagacctcatctttgctaaaaataataaaaatttttagcataaggcttaagttaaaggaggtcccatcatggagcaatgcatgatgggaaattcccacccagcatcttttaccagaatcagtgctttattcatggagggaagaaaattggaacagtatggatggtcacttttcagaggcaatggagagaggattcctgcatcaggtggattccaggatactattagaatgcccagaatctaagattctagaattctcagattctgacacactagtatccatgattctagaatctagaggctcaacgtttagagttttatgaatccaagattctaacattccagattcccctggatcaaaaaactccaggattctaacattatctgaattaaatctaagatatgactagatttaaaaaagactagaattttggctgggtgcagtggctcatgcctgttttcccagcactttgggagtccaaggcgggcagatcaccaggtcaggaatttgagaccagcctggccaatatggtgaaacctctgtctctactaaaaatacaaaaaaaaagataataataataataataataaataataaaaaaatgaccccggtgtgggatgtggtggtgcatatctgtaatcccagctacttgggaggttgaggcgagaggatcacttgagcccaggagttcaaagctgcaatgagccgtgatcacaccgctgcactccagcctgagcaacaaagcgagaccctgtctcaaaaacaaacaaacaaacaaacaaacaaacactctgaaattagaatgtgtcttccagaaaatggtgttatataatcaatgggatctaatgggatctttcctcctcctcctttttttcttctcctcctcctccttcttccacttcttcgcagttcatgaaataatggcacatcttaaaaatgctagcatcttatatttggttaaatatatcgattggcagatagatagactgacagagagagagaggagagagaaaaggagaagacagagatgaaaaggcagagacagaggggtgagggagcaagtttcagagagagttctgggccaggtcatacccttggggctggacacggccccccagcctgagatgagacactgcatgcctggggagacacaggtctggctgaggttgaggggctgcacagcaggactcagacgtgcctgcctgggcaggcggatcagcatgatgtcatcattgtggtcattggcgctgaggtccttgttgaagccagggtgggggaagaagtccgtaacccggaacagctgctccggaccctcccatttccagaggtggtgctctccaaggcggacccacagatacctgctgggacaggcctcagaggtcaagctgggggaaaggtaaaagtcctttcagccccagccctcttttcctgtccatcagggtgctgtgtgaccctctgcaagccacacaccctctctgcaccctcatcatctatgtctggcccagggtactgtgattttaagcgaggcacacacctcctctgggtccctggtccccactctgatgttttgtgtgtctccatctttgtagctctccccacaaagcccccgctcctagtcccaggctgagtgagccaccttcctccctactcacctggagccttggtggtgacttgggtccctaggaacggtgtgggcacgggggaccccacctaccacataacaaccgccccacccctgcccccacaggtctggtggcttctgtgggagcggctctgtatgtctaagtggtgtgtgtgtatacgtgtgcgtgtgtatgaaaggggatgggatatggaaaatccccaaattgggggtcatctctggcctcagcttttcctgtctatcatatccttcacccttcaatgcatgtcttcctggtgtctaaccttaagccctcaccacagtctcagcgcacttgtttcatttctggtccatgccctagacagctgggatcctttcggggatgacaagtccattccccagcctctgacctctgacattaggcagcaggctaatgactgcgaattcagggttggggaaccagaaacatctgtgtctgtctctctctgtcattcttgctgtcttggctctggatctggaaaagtagtcctcacccctacatcccttcatccccctacccttcccctgcctctcactctcttccaccttcatatctctgcatttctcctgcttcactttcggctgaaatctgaacatcgttctcccagtctgatgtataggcttaagttaaaggaggttccatcatggagcaatgcatgatgggaaattcccacacagcatctcttaccacaatcagtgctttactcatggagggaagaaaattggaacagtatggatggtcacttttcagaggcaatggagagaggattcctgcatcaggtggattccaggatactattagaatgcccagaacctaagattctagaattctcagattccgacacactattatccatgattctagaatctagaggctcaaggtttagagttttatgaatccaagattctaacattccagattcccctggatcaaaaaaactccaggattctaacattatctgaattaaatctaagatttgaacatagaattttaatgttctaggacaaaaagactagaattttggctgggcgcggtggctcacgcctgtaatcccagcactttgggaggccgaggcgggcagatcacaaggtcaggagttcaagaccagcctggccaatatggtgaaacccccgtctctactaaaaaaaaaaaaaaaaaaaaaatagcctggcatggtggtgcatacctgtaatcccagctactcaggaggctgaggcaggagaattgcttgaacccgagaggcagaggttgcagtgagctgagattgtgccactgcactccagcctgggagatagagggagactctgtctcaaaaaaaaaaaaaaaaaaaaaaaagaaagactagaatgtcatcattctataaatctataaccttagaaatttaagagtctgggattcaaatagtttaagactacagaattatctgaatctcaatattctaggatactgtgaatcaaagattctagtactgtgagtttcaatattcaatgaatctagaaagctctgaatttaagattctaggatcacactagccattatggctattgaacacttgaaatgtggctagtccattttgtaacaggctatgtgtgtaaaatacagaacagatttcaaaggcttagtaccaaaacaaaagtaaactgtatcgttcatacgtatttaaaaattgattacatgtcaaaataagtttttgggtatgtcaagttaaatctattagaattaattttactcattccttattttttaaatgtgtccaccagaaatttaaacttacacatgtggctggcatcataattcctctgggcagtgctgacccagactgctaagattctaatagtctgcgaatctatgattctaaaatttgctgaggctattgcagaatttcataaattcaagattttaggattctacgattctggatttctctgggtcagtctcggattcgaagagcctaagtttcgaatcttagacttctcaaatgagatattgctggtctctagaattttaggatttgggaggctacccttcctacttctaagagttgaacttgtggtatcagaagtggaggctccgcacttctggcctaaagcacccctcaccctctcctgacccccagcctctgtccctccccagcatggccagcctgggtcactcacggcttgcggcagtgggcagctgtgagcagccagcggtcactgatgagggtcgccccacagaagagccgagtaaggtggaagaggccggcctgccaaggctgggagttggggcgacattcctcggccccgatggcacgggtgtctgcccagccatgccctggggtggggatgagggacaaaggggtcagcgaagagcaggctgggagggcagggagaggatgctgagaagcctagagggcaggaggcagaagcctgggatgggagggaagagcaaggtgaccttagtacagccgtgaaggggcagccagcctgggagcctcacctgccagcagagagagcagagcacagaggagtcccagcttcatgacccctgggcacctggatcctggaacgtgcacccggcgtccagtgcttctttatggtaagccatgccatctccttcctcctccatggggccgcccctgtgattaatcggggttgggaaatgtacctgggggagggggaagccctggggctgtgacaggggccttgggagaggaggtaagtgcagggggaccccccttttgggatgaactggcggcttgctgggccagagcttgactgaatggaggaggagtgctgggggtgtggagaggttgtgggcacctcctctggggtcttcagagtgggagacctcattcctcatcaccttaggctacaagatacagaatcttttgtgtcctggaaaaggagggagatccttgaagcctaaggtcctggggtgcagcaggtttattttggataaagcagtggtgtgcagagaccaacctcccacggcaggctggagggatgtgcagggggaccacccagaaaggaggcgaggggtggaagacagagtcaggactcagacacaagagcaaaagatacaaagagagggaggtacaggcacagaaggacccaagatgagaggaggagtgggaggaggagacagaacacgggaaagattgagggaaatccaggtggagtgaggcagagaccacaggcagctgcacaggtttacacaccttgcagaaccttccctgccctggggatttgggcctcttcccacaaggacaaggccctctcctagaatgttgagaaatctggttccatctggattaacccactcttgtcataacctgcccccttccccacggctccaccacccaaggacccaggtgcccaaccttccaggtagcaagtgccctgtgctctctcttaatacatcctgatctttgccaaatcctgagaacatttgctatatatttttttcatccatctccctgccccccaccccattgtcccttccatcaccccatcctccctgcctctctcctcatcattccttctcaccaggtggacagcttctggagggctgggcccaggtctgactcatctctgtgtcccagcatcaccccgttccaggcggaacagggcttgcagaagtcctcaggagatgttcattgaatgagtgaatgtctttctccatatccttcttttcctggtgaactcccactcatccttcaacacccaacctcaattctccctcctccaggaaatctctgagatcctcaggcagagtccatctttgcctcccctgggcacttacgatcccttccactttctcctgctcacaggcctggttatgaagctgggtctgggctccccttgaatgttctctcactgtgtcgtcatggtttggagcatggactctggaactgaaccatgtgtgtccaaatctcaatgattaggtgtgattagtgatgaggtgtgtgactttgggcaagtcacaagacctctctcagttgctccatctgttttttgtttgtttgtttgtttgtttgttttccaaaacggagtattgctctgacacccaggctgaagtacagtggcgcgatctcagctcactgcaacctctgcctcctgggttcaagcaattctcctgcctcgacctcccaagtagctgggactaaaggcgtgcgccaagacacctggctaatttctgtacttttagtagagacggggtttcaccatgttggccagtctggtctccaactcttgacttcgtgatccgcctgcctcagcctcccaaagtgctgggattacaggcgtgagccaccgcacctggcctgctccatctgttaagtagcagtaataacgagggtcgttggggggattaagcaaatttacacacatgaagcacaacagtgtctgacacatggtaaatgttcaatgtctcttcatcccctgcagaaacctgtggtgcctttatcatagctcatttcacccttgcctgcagttgtctcactccctttccagacagggaagtccttgagatcagggactgggtatccactatgtgctaagtgccaccttaactgctattaagagcattttagaccaagcgcggtggctcacgcctgtaatctcagcactttgggggaccgaggtgggtggatcacttgaggtcaggagttcaagaccagcctggccaacatggtgaaactctgactctattaaaaacacaaaaattagccaggcatggtggcgggcggcctgtaatcccagctactcgggaggctgaggcaggagaattgcttgaacccgggaggcagaggttgcagtgagcctagatcgtgccactgcactccagcctgggcaacagagcaagactctcaaaagaaaaataaaaaaaaaatgagcattttaatagctacctttattgactgtgttctcagtgcctggtgttaggtgaactttgcatgtatattatctcatttaattatccttttgttgttgttgttttttgttttttgacacagggtctctgttgccaaggctggagtgcagcggcatgatcatagttcattgcagcctcaacctcctggactcaagtattcctcctgcctcagcctcctgagtagctaggactacaaggtgtgcaccaccatgcaaggctaattttttttttttttttttttttttttttagtagagacgaggtttcactatgttgctcaggctgatcttaaactcctgagctcaagcattccacccatctcagcctcctaaagttctgggattataggagtgagccactgcgcccagcctatctcatttaactctcacgggagtctaattaagcaggtgtctccatttcacagagtgaaaactgaggaagagacagcattcaagtaatttgctcaaagtcatacagcaaagtgattgaaatgcatttccttctctacctggtgaactcctacttatcctttaaactcctgcacaaatgtcccctcattgagaagcctttcctgactccttcaggcacagcctgtggacttggtgtggtgcaccccatacccccttctgttacagcactgatctatttgtgttatgtgttcacacagcaacgggggtgacttctgtgtgccgggcacaatacaggagcttagaaaatcacagtgaacaaatatctgaatcactgccctcacggaatttgtggggaagggtgacatagaccattatcaagtaaacacaaatgagataatttcaggtataataggtgctattaaaaaaaaaaacaaacaaacaaaaaacagagcatcgggactggatgaccaaaagtggactcctatagcctgggcaattcaggaaggcctcccggaggaggtgacttttgagtggagacctgaatgacaggaatgtaagactggcctgtctccctgacctaactagcagctccttgagggtagtgcctggtctgattcatctttgaggcctggcataagacgtggctcgataaacattgtggagtgactaaagggacgggtgagttgcctttaataatgaatcgagttttcaagtttccaccgacctcgcttctggtctttggatgacaaacccagctgatacgcctgtctgacatttcctgcgtgtgctaatgggggcagaatgggaaagaggccacggaagggagctgtgtgctcagaccttgtacatcaacctcctgtgggctctgcagggtgggggaccttgtgatcacccctacgtatgtccccagcacccagcactgggcctggcacataatagatgctccataaattggtaactgaaaggacaaacaaacaaacaaaaaccccgtgcttaatgggaaatttctgttgtgcctatattcagctagcttatgttactgcttcaaagttcaggataagctgagacactcaaacttcttctttttttgagatggagttttgctcttttgtccaggctggatggagtgcaatggtgcaatcttggctcactgcaacctctgccccccgggttcaagtgattcttctgcctcagcctcccaagtagatgggattataggtgcctgccaccatgcctggctagtttttgtattttcagtagagatgggatttcaccattttggccagactggtctcgaacacctgacctcagatgatctgctttcctcggcctcccaaagtgctaggattacaggcgtgagccaccacacccagcggacactgaagcttctattagccttacctggattctgtgtattaactccccttccctcccccaatttcagggagaatcaaacaattcctcctcccaagttttcaggacgaaaatctcacagccaattaataacagacaaaccaaagattttcccctaaatgtcagagggaggtttcttggcacaagctgggcagttgaggtggcaagggtttcccaatcttcactaccccctcggccctctggtcttagaggctgggatagaagcaaggtgaggtcccttgagttcagtggcctcatgaaggcagagaaggtgctaatgactcagggccagcctagctcggaggaactggtgttgggtggaaccagaagtgggaaacagtgggagatgagaaggaagtggttaaaaggtgtttcctgggacttggaactagggtgaggaaaatgattcttccatcatccctaagggttggggatggaaggttgggactgggggctaccctgtgcacttcttccctggacacacgctttcaccgggacgtggtcagatcacgacaacaggtaacctttagtcagaactcaccacccactgtgttaagccttacatgacaatcaccatgaagatttacatacacatgttatatcatagtctcctcacaacatgtctaagaggtaggcacgtcattgttcccattttgcagatgaggaaactgaggttcagagagggcacttggcttgcccaaagtcacacagcagggagtggcagaggaagtcaggttgggtgaccccagtaactgctctcagaggctgggtgatgaccggcttcctggcttctctggaataaacctttgccaccacttcctgcatttcagcttcagtacaggcagagaatggggataggtgggggaatgaggtgagaggggagatgtttagaggtgtggagggcggcagaggtttgaacagtgcagacaaggggagagttcagccgactggggaggaagaggatggacgatggagcctctgggcatctggatcagcaggagcataacatctggatcagctggagcgtagcatctggatcagttggagcgtatgactttattgatccaggacatgtatttgcagatctgggtgtagacagctggatgctgggcagagccacaggggtaaacaccccacgagaggatgccttggagggtctcgtcacagaccagggggcctccagagtcactctgggggtggcaggaaggagagatcaaataaatgtgccaacgtgagagctgtcactttgggatctggggcagtggtggggaaggaaggagttgggttgggataaagacgaggatgggatggggttggaattaggtatgagctggaaggtaggaatggaggtggacttcaggttatgggaggttgggctgggggatgagaatgaaggcacagtgagactggggttgggattgtagttcatggaaggtgaggggatgaaaatgggcttggagatgggaatggggtggggttgggatggaaatgggattgaggatagggatgaggagggggttaggtctgggtaagagttggggtcaaggatgggtttgggaatggagttggggatcgggcacagggtctgctcttttcccataacctccctgtcctccctcccaggagtcagagactctccctgttcagaccctacctggcaagggtcctggccccggtccagtccagcacatatcatgttgttggtgaccacgccagggtagaagacctcacactctttagggctcaggatagtgatgctggagcaggtcaggcccttgttgtacttcactgaagggagaatatgccagtaatccctgggtccagcccccaatccttggggagccaggagtccagatacaagaccgtttctatcctaagccccagcccctcctccttcagactcaagaatcctggccccagcccctccccacttagacccaggagtccaggcccccagcccctcctcccctcagactcacagacccaggcatctaggaccccagcccgtcctccctcagatccaggaatccagtccccagcccatccttcctcagacccaggggttcaggccctcagccccctcctcctgaggttccggcctcagagccccagctcttgcctctccgggcggccgtggtgccccagccagcaacctggcactggtctccgggctgagcacagcggtagggaagctgcagggcccggacgcggggccccagcactacgggcctggccagcttcagcaacatgagatcgtgctcatccgttcgccttggcaggatggggcctgagccctggtggtacttgggatggacaacagagcgagtggtccggcggagctgctctccctgaagaagcagcaggtggtcatcccctactcgagcccacagtggcctgggggaaggaagaggcatgtgaaggcaaacccttcatagggactgggaaagcaggtgggcagtgacgcagggcctggagataggaagagtctgagggaagagggccttgtgggagaaggggacctcagtggacatggggaggaggaatcagttgtttgagctctgaggatctgtaggaattgaggagggctgggggcctggacacctaggtaagccttccacattttcttttctctttttcttttctttgttgaaacagagtttcgctcttgtcacccaggctagaatgcaatggcgcaatctcggctcactgcaacctccacctcccaggttcaagcagttctcctgcctcagcctccttcctgagtagctgggattacaggcacccaccaccacacccagcctttttttttttttaatttttttaaaattttttattttttattttattttatttttagttgagaagtggtttcaccatgttggccaggctggtcttgaactcctgacctcaggtgatccacccgccttggcctcccaaagtgctgggattacaggcgtgagccaccgagcccagcccaactccacattttctctgtggtaatacccaacccttcctccttcaacggggactcacgaagtgaaccttttcctttagttctaaattcctgaccacaccggaccctggcttctatccgttgcaggcaaccacctcctcctagagctcaaggagaatcagcgggagaggagtgacgggcccagaaatgcggaaaaggaccacaccgccccctggcggccacagcgcaagcccggtctctcctcctgctggaaggacaccggggaccgcacctccagctgtgggagttccgagagaccccgccctgcccgctcctccctggaggccgcctccacagccccccgtggcgtcctcggggatggatctcctcctacttgtttccgcagtgcgcggccgtcagcacccaactctggtccaccaggacacccgcgcagtggaacgagaggccgttgaagagcgagacctgccagggctgcgagccgcgcgcgcacggggagccataggcttcggggtccaagcgcgtgtcgttttgggggagcagcgccgcctctgcggctggagaaagaaaggggacggaatcaaagcacggagggcagggtctgggtttggggttggagctgggctgtggcactggactgcgttcggggacgggggacgcagccagaacgcgagggtggtagggaaatattgggggtttcgcgtgcaccgaagggaatgggaggagaagaagcgcgtgaaagtggaaggaagctgggatagggtagcgtggagtaatgagacagaatagggtgggtctggagggcagggactgaacgcagcgcgcctggagagctggctagaacgtcgctggtcgatagaggggcggggattgaacgcggcggggaggtaagggtgcggggatagaactcggggatcggggagaggaaggggtgtgaataacaaaacgggattgaaaaccaggagaggggtggggcgcagtggtttacgcctgtaatcccagcactttgggaagccgaggcggttggaccgcttgagctcgggaattcaagaccagcccgggcaacacagcaagacccagtctctacaaaaacaaacaaacaacaacaacaacaacaaaaaagtagtcgcggaggcatgcgcctgtagtcacagctacctgggaggctgaggtgggaggatcgcttgagcccaggaggtggaggttgcaatgagccgagattgggccactgcactccagtctgggcgacagagtgagaccctgtctcaaaaaaaaaaaaaaaaaaaaaaaaagccggatgtggtggtgcatgcctgtggtaccagctactctggaggctgagtatcgcttgagcccaggaggtcgaggctgcagtgagctctgattgggccactgtactccagccacggagacagagcactgccctgtctcaaaaaaaaaaaaaaaaaaaaaagaaggaaagaaaaagagagagaaagaaaaaaacaagaaagaaagaagaaaaaataagagagaaagtaaaacaagaaagaagaaacaaacgaaaggaaggaaggaaaggaaggaaggaaaagaagaacgaaagaaagaaaagaaagaaagaaaaagaaaaaagagagagaaagggaaagaggaagaaaaaaagtgaggggagagggcaaaaagcggtaaggcaagactcaggataaaacacggtggtgtggccgggagcggtggctcacgcttgtaatcccagcactttgggaggccgaggcaggcggatcacgaggccaggagatcgagaccacggtgaaatcccatctctactaaaaatacaaaaaactagccgggcttggtggcgggcgcctgtagtcccagctactcgggaggctgaggcaggagaatggtgtgaacccgggaggcggagcttgcagtgagccgagatcgcgtcactgcactccagcctgggcgacagagcgagactccgtctcaaacaaacaaacaaacaaaacaaaacacggtagtgtaaaatggagcggggccgggatggggcggcgtaagaggaggagaaagaacgcggcgaagagtccacggaagagcgaggatccgggtggcagaaatcggacagggcctgagtggggcgggtcacccaggggccgagccagaagaagggcccagctgacttgggggcgggccgtgctccggagcgctgggtgggtgctggggtctcgggggaggagaggtgcgcggggcttggtgacgggaacacattctcctcccgcccgtgcctcccaccggcgcctctccccgccccctgcccccgaccttaccccagagttgcgccatcagcagcggcagcagcttcgccagagcccgggcgccagaggcggcggagaggtggaggtgcggagctctcatggccaggatctgctggggtgtgtgcaggggcgggttaaaacagatgctccgttagagacccccacctcgccgcgctcatccgcccagcctgggccaccccagcccgcaagcacccttttgacctgcagccgataaccccaggggctggcagacgggagattcgggctggaacagcggtaatgggcacaattaccctaatgacgcccctcgcggcatcttcccgtcctccctgtgcccgagtggagcgctctccgcgccccagctaccctggctgcagccacgccgcgcccgaggtttccccctccttcacgcgcggggtggggatccgaggctcggagccagtgggagcctctttctcaacctcacagcggggggacttccgcgtcccgcaggtggagaaaccgaggctctaagccggctcctgcctgtggcccgggggtccccacccatcctctcgcaatccaccccaacccgggtggggtgcaggtagcttcacctgggagtcgccgataggaaggagggaggggacccagacgtgcctctgccctgcctgtggtctgccgctggtatcctctgcccagggacccctggcgggaccttcccttttaaccccaaggagtccggaagcttctccaccctcccctacccccacccccgggctccctccctttccctctgtctaattgtaccgtgggtgaggctggcactcctgggtcccagattcctgctctgggaggggccctggaatacaggcttctcccagtgcccgaaacgcccccttttcatcccttttggaactggcttccgtggggattctccgggtcccggtgccaagaaggcttcccaggcgcggggagagggttcacgtccccagcaaggctaggggtggcaggatgagaggccactgagcaagaggaaatcaatgggaagtgcatacctagagtgacaatgtgagaagccagactgtggaagaggaaggaggaaggcctagagataaagcaggttgagtaggagggacagaggctggcttgaaaagggagattgtaacaaaccaaggctaaaagagccagagagagagagagagagagagagagagagagagagagggagggagggaggcgccgaggctaagagaaacagaaacaaggaaaaagggaaacccacgcccactctgtggccgtgagtgagctctgtgtgtgtcccagtgactagcccatgtgcgtgttggggggggctgtggctctgcctcatacccatgtgtggccatctcacaccctccctgccatctgtgtgccaccaggtgacacacaggcccctgaatcataggaggtcaaagctgtgaggggcatcggcatcacctcagccaactccctcatctcaggtgaggagtgagaggctcagagagggcagagactcacaggaggtcacacagcaagtccacttgacaaccagaaggccctggttccactctgggctcctattgctcatgccagccacttctgcgaggtgaacagaccatcccaaaagatcctgagctggccgggcgcggtggctcacgcctgtaatcccagcactttgggaggccaagggggggcggatcacgaggtcaggagttcgagaccagcctggccaacatagtgaaaccccatctctactaaaaagacacaaaaattagctggggatgttggcacaggcctgtagtcccagctactagggaggctgaggcaggagaattgcttgaacctgggaggcagaagttgcagtgagccgagatcacgccactgcactccagcctgggtgacagagcaagactctgtcgcaaagaaaaaaaaaaaaaaagatcctgagttctggattctctccgtgggacatcctcttcagaggccatctaactcagtgctgctcagctgaactttctgcagtgatgttttatatgcactagctaatccagccaccaccagtcacatgtggctatccagccttggagatataacaagtgagacagaggagttacatttctggctttatgtaattttaattggaagagccagctgcggttagtggctaccatattggccagcagaggtctccactatctaattacctatcatggaagttggagaaaaacaataagctcctttggttaggtcttagtatgtgcaggctaactgacttctttacttactgtgttatacttttgcatgcagcattttacaggaaaggaaacaaacagagccttactccaggaacatcacttggtaattaagagatcgccttgcttcagatccttgctctcctagccacgtgactgtgagcaagtgactttgcttctctgtgtctgtttcttcaactataaaataggtatgaaaacagtaccgacctcacagggttttgtgaggattaagttgatacatttgaaagtgcttggaggccaggcacagcgactcatgcctgtaatctcaccacttttggaggctgaggaggacagactgcttgagcccaggagtttgagactagccggggcaacatactgagacctctgtctctacgaaaaatacaaaaattagctgggcttcgtggcatgtgcctgtagtcccagctactctggaggctgagggaggacaatcacttgaccccaggaaattgagattgccgtgagctgtgattgttactgcactccagcctgggcaacagagcaagactgtctcctaaatagattaattaatttaatttcttttaattaataaatgaaagccgggcgggcgcggtggctcacgtctgtaatcccaggagtttgggaggccaaggagggcagatcatctgaggtcaggagttcgagaccagcctggccaacatggtgaagccccatctctactaaaaaatacaaaaattagccggatgtggtggtaggcacctgtaatcccagctattcaggaggctgaggcaggagaattgcttgaacccaggaggtggaggttgcagtgagcagagatagcaccactgtactccagcctgggtgacagagcgagactctgtcaaaaaataaaataaaataaaagccattggatcagggtctagcacatagtaagcactcagtagattcactcatttagcaaatatttattgaaaccttgatatatggccaggagctgtctttggggctggggatacaacagagaacaaaccaggtgttgtcattcccagagtcacaatatttcaaggcagaatttgaatccaggtctcactgatttcgaaccccaggttgattattaagtgacagcatctcctgtagtccaggaggcccaaagaatgttcgtagagggtcttggcttagggtttcttattaacagagtgaacaggaaccaaacaccaagtggaaatggagggtgatgggctgtggtgggtgggtccagtctaattgttcttcatcgtctcctggatccagtccacatatttgcagactttcgtgtagacaccaggctttcgggtgatcgcacacggatcctggccccaggagataatgccttgaagagactggttacagaccagagggcccccggagtcaccctgggcacggggagagagaatgtcggtcagagaaagcgttgagcatggtgttagccagggaggaggtggggacggtgcttaggagtggggccgagacaggatgggtaggcactgggaaaggtgataggtttagcgataaagctgggattatgggtgggataaaggatggggttaggctcaaaaacgagtttggggatggttggagctggaaatggtgtggaaacggggatggagctgaagtttgtgctgaggtcagaaacgggaacaggggaagagatggattgggagttgcaggggtcggcgggttgaggttggggatgaaattgtggatgtcggtaaagatgtcattgaagctggggatggggatggggctgtggttggagaccacactgacctggcaggagtccttgcccccttcctgcacgctggcacacaccatggtgtctgtgatgttgccggggtaggcgttctcacacttctggtgctcaatgatggtgatgttggcgcatcgcaaggtgtgaggcaggcgtactgtggaaacagcgtgaggggctgtgggaatgagccccctgccacctcccctaatgcagtgcttgctgtgatcccgcccctgggggaatccctgtccttagacgcagccaactcacctctcttcttgtaacaatagcaacagcaatgctatccagctttttttttttttttttcgagacagagtcttgctctgttgcccaggctggagtgcagtggcgtgatcttggctcactgcaacctccgtctcccaagtttaagcgattctcctgcctcaacctcccgagtagctgggattacaggcgcacacaaccacgcccaactaattttcacatttttagtagagatgggatttcaccacgttggccaggctggtatcaaagtcctgacctcaggtgatcttcccacctcggcctcccaaagtgctgggattacaggcgtgagccacggtgcccagcctgctatccaataaatgatttatgtcagttgcttgatatacattatctctaatccaatcctgacaggtgggtataatcattctcattttatagagaagaaaatcaagattcagagaggtgaagctgcttgcctaaggtcttacaaccaggaggttatggatgtatgattgcatatcccgtccgtctgactccaaggccccaacttttgtccccacccccctatcctgacgttttccacacatcctctcaacttatcccacatcgtcactgtgaaccgcatctctgatgccctgaacccttccacaatcctgaccactccctcctcaccaccccctgccaggttcccctctggtgctcctacactgggggctggacgtgctgccccagccggaaatgaggcagctggtgccagcagtgacacagcgtgaggagagggtgaggggtcgcacagcccaggtgatggagactggcgatgccatcttcaccagcatgatgtcattgcggtggtctttgttggggaggctgttgttgaagccggggtgggggaaggactcagtggctgtccgggtctgctcacagccctcctccttctggaggttgtgctgccccaggtgaactatgtagcggctgaggtgggagagacagtagttggaggaggaaaggtcgggggagacatgggtgggagaggtgagtgacacctttgaggatgaagaaacatcgctctgcttccaacctcttccacgtctcccaccgaagcccccttcccagccatagccccatcccaaccccattcatccccccaccttcaataccaactcgagcccatcaaccttgctgacactacccatccccatctctaatccccttaccagcacccctatccctgagcttctctccatccatctccccattcccagccccccaccccggcaccgccccagcccccgcacccacggcttgaggcagtgggctgctgtcaggagccatctgggggcgatgagcgtcgccccacagagtagccgcgtcttctcgaacagggctgcctgccagggctgggagtgaggcttgcactcgaaccccttgatgatcctggtctctccccctacaagccctggagggggtgagagcaaaagaaggggctcaggaaggagaggtggtagaccaggaggactcccagaaatgggggtggggaggagagaaagagagtgggtggtctgggccctggtctggtgtccctctgggttgccctggatgctggggtcgggtattaaaggatgaaaatacttccataaggtcaaatgcagtggctcatgcctgtaatcccagcactttgagaggctaaggtgggaggattacttgagcccaggagttctagatcagcctaggcaaacatagtgagacctcctcccccatctctacaaacaattaaacaattagcctggcttggtggcaggtgcctgtggtcccagctaccggggaagctgagatggcttaaggatcacttaagcccgggaagtcaagactgcagtgagccgtgttggcaccacggcactccagcctggacaatagagcaagactttgtctctgggaaaaaaaaaaaaggaaatacttccatactggttggtcagtagcccctgtcctgggcgctttgagtgactgctcccccaactccagcttcctcagcccctccacgggaccctttacgacccccttgacctctcctcctttggcatttaaagggattatctagaagggcatccaggccctcatgaccactgctccagttcaggtgccttatgggttgttctgtaatttggaatcagccctgtcactgtccagacacagagggttaggggatcccagagattcaagagggaggatcctgccctgcccccatcccctgcgtacctgttgccagagcaagcaggattaactgcagaatcctcatggcctggaggggggaggagcgggccccaggttcctctgggaacaaggagggacatggggccgcatcactttacggggaaatcgggaggggggggctggctcatgccctctcctctctccctcacctgctcccgctccccacttgggagaaacaaggttggggaaatcccctgtttctcacagcactcagatctccaaacacttaaaatatatcttaggtgtctagggtggccttggagagggcctggtcacagctagaagcttccgagataccaagaaccatgtggaagtcgttgggaggggctttgagctgtcaagccatggttcggccctgttcaagtcagccatgggacctccccggcacatgtcagaggatgttttccttcttgccttgagagctggccaggccccagcagcttggggtggaaggacaaggggaaccagacaccgttccgtagccacccctttttcattgtcttcgcagcagagcgatatggagcctttgaggtctgctggaggggagtagggggctcagccccagacaatgtctgggacccccatcacccggcttgctgaagccctgtccgccaaacccctgcccttttgaaggacagccaagcaaagctgggcggggctggtcgaggggagggccagtgccctccgctgccctggccagcgggggtgggagcagagggccagctcagcagctgaagccatggagattagaggtaactgaggctgcggacagccatcggaggtgagaggtgtagagagaggccaggaacccccacccaagcagagaaggacagagcagagggagaaatgggtgcccgagtgggacaggtgtccttggggagggctgacacctggacggggaggggcagcttccctttcctcctggactcacaggctctggggctggggctctgggggcccagtggcggcggagacggcagtggcggcagctacagcaggtaggctgggttggagcgccaggtgccaggcaccaggcaggcgggctggcaggggggcggccctgggcgggcccaggatgactggcctccaagccctgccttaatgccccggggcggggtgtgtgtgagggccctccccggaggcctctgaggcactggctgcctgcctgtgccacctctccaagcccctcttctccctgtgtctcagcctccctctgtctgtctgtctgtctgcagccttcctttccctgccctgagtctctgaatctgtgtctcgttctatgtgtcattccctgtcattcagtaattctgactttgtgtgatttttctctttctgtccctatgtgtctgtctgcctttctctgtcctcgtccctgtctccatctccactcttctctctctgtctggctctgtgtggccctttctctaattccttctatctttgtgtctctcagtcagtctctctgactgcatctctggcaatttgtcttgaaatccctcttcttccatctaatctccgtctctctttttcctcccgtcccagccactccctctccacagccccagcccaggtgggcccctggcctcccctaggccgctcccttctcctttgcaaggagagggggggtgtgctgggatgtcacacaggtggggctgctgccaggcacaggggcaggaccggagggtgggggaggcaggtcagggcctgtggaagccgagtccaggaaagggaacagagcccttggctgtgctccaccccagggctcctctggggcctcgctcctctgctgacccttcccctgcccgcttctccctgccgcccaggcagcccgagtccagctgttcacttactggctgctgtgagacctctgcccgatgacttccagtcccgcagccacctcaacctctgcatctgcggaacccgagcgcagattcctgcttctcccagcttgtttgttttcagttaggtcccttcccttggctttcctcccctctctcccctgaccaggtgtggagcaaggcaggggagggcctaggttctgacagcagccagccctggcctcaaacctaggtgcttcctcttcctactactatgactacccttatgacgtggggacaagggactccacccctgcaaggctcagtttcttcatctgagagatgggggtgacagacctgcttgcaggggaggttgggatcaggcttccaggagggtccacttggaaagagcagactgcgggggggctcagcaaatgtgcctccgctggtatgatcacccctcactccctccctcctccagtttcccttcagtgcatttggggagatggtctctcctcacctcttgagtcccagtggagacagaatccaaggggtgggcaggaggattaaagacgtaggctgagctctcctgctttccaagcctgcactccacccttcgtcttattagaacaaagccacgtcccacattaaagatacaatgtatgcttcattacaagaaagtaaactgcagttggctagtggaaagaatgctacgttttatggacattggattaaatggtcataaatgttgactttgcagctttcatctggtattttggagctaacaattttctttttctttttcgggtcttttgtggactcttgaaaagcttataagctctgggcactatttctattatgccagatgaagaaacatgtgtcttatttatattgctgggtttttgtttttgagacaaggtctcactttattgcccaggctggagtgcagtggcatgatctcggctctttgcagcctccacctccccggctcgggtgatcctcccacctcagcttcccaagtagctgggactacaggcacgcaccaccacacccagctaattttttgtgtttttgtagtgacaagatttcactgtgttgccaggctgatctcgaaatctgagctcaagccatcctcccacctcggcctcccaaagtgctgggattacaggcgtgggccactgcacccggcctatattattaaaagtaactttttctactccatttctgagtaactactcagggaagaccctcatcctatttgagcactgggttttttgtttgtttgtttttgagatggagtctcgctctgtcgcccaggctggagtgtaatggttcaatctcggctcgctgcagcctctgcctcacgggttcatgctattctcctgtctcagcctcctgagtagctgggattacaggcatgcgccaccatgcctggctaatttttgcatttttagtagagttggggtttcactatgttgaccaggctggtcccgagttcctgacctcaggtgatccacctgcctcagcttcccaaagtgatgggattacaggtgtgagccactgtgcctggccttatttgagctctgtttctactcctatgagatagggaaactgctgagtccttcttccagtctcaaccagcatgaggacttcaaatggacagacatggcccctccttcatttatatttattccagactattgcacacttctctcaccccgctcgtgggtcttagaagggctggcaggagttaaagttccaagaagttcccaggccaacaagagtggagctaggggaagtgatggaggagatattggtgctctgagggccagaggggtacccaagttaaggggtgggggtggaggtggaggaaacaggtcagttgttcctcatgatcatccggatccagtccacatacttgcaaatataggtgtagactccagggatgccatcttgtccacagggccccacagacccccaggacaccagaccttgaaggactcccccacacaccagggggcccccagaatcaccctggaagggaagagaagtactgtctgaacaagggagacatcttatttctgttttcctccccaacccttcaacccagtcctgggccttggggagggctccaagtctggtcattagacaaaagagtataatcactttcccggaggacaatggcaatggctaaccaaaagagaagaaccactgtctctaggggccaatcccagggaagaagggtggaactccataaaggacagaggttctctcaaggacaatggctggggccctgaccaatgaggagagagagcacagtcattaatgaccaatctcaggggaggctgtcaagacaacataaagagtcgagcattctctcaaggacaatggctggggccctgaccaatgaggagagagaacactattatcaatgaccaatcccaggggaggagggtgggactccataaaggatagaggttctctcaaggacaatgcctggggttctgaccaatgaggggagagagtgccatcaaaaatgaccaatcccagggaaggtgggcaggactccatcaaaagcacagagttctctcaaggacaatggctggggccctgaccaatgaggggagagaccgccatcctcaaatctctctcagtctgggacagcaccaactggaggatggtatgggaaagacttagagccccagaaacagctggttccctgtctgggctcccagtcctctccgtctgttttgctgtctctctctgtaacccctgccccatctttccttctctgttcccttcctccctctctctccctgcccctccccctcctccattccccggtcctcccttttactccctgtctctctccctcccttatcctgggcctctcctccattattattattattattattattattattattaattattttgttttgagacagagtctggctctgtcgcccaggctggagtgcagtggcgtgatctcagctcactgcaacctccgcctcccgggatcaagcgattctcctgcctcagccttccaagtagctggggccacaggcttgcaccaccacccccggctaattctggtatttttagtagattcagagtctcaccgtgttggccaggcttgtcttgaactcctgacctcaagtgatccgcccgcctcggcctcccaaagtgctgggattacaggtgtgagcctccgtaaccagcctctcccttcctttttgaccccgtctctctgcagcatcccctttccctgattcatcctccatcagttcccctcctgcttccagcccctccccttcacttcctgtcctggtgaccacgcacgctgcctgcactggctcacctggcaggcatcctgccccgggacgccgcctgcacacaccatgttgctcgtgattctcccgggatacacaccatggcaggtggcatgggagacgatggagaggttgaggcactggagcagatccgggaatgggtctggagagagaacatgcgtgctgcagggtcccctaaatctccccactttgaggccacgtccctcttccctggatgtggcccatccatgtcaatacccctgcccctcaccgacctgtactacaatcccgaaacctccaagttacatatttatgacttaatttcatatgaatcatgaccccagatgattgacggtctctttgatctttgacatttgactttgagtggcataactcaagaactttcttgtctctccagcgtcagagacaacgaatccagacctgaccctcttcaatgccagctactgtgatctttgaccttctgtcttattaccttatgatcccagcttgatctcatatcttctgtctcctgaccccatgtccctgtctttaccttaacctccaacctcagctctgcatcttccaaacctcactgcttccaacgccagtgtcccctgatcctagtttattgggccccagcctccatgaccccaaacttcgggccccacaccccaaacgctatgacctccaatctcagatatgtgattttggatagaatcccaatttccatcctcagattttgaccagattgtacaacctctggatcccatgaccttaattctacggtgacctctaaccccagacccatgacccacaatgcccatatcctatacatacatatatatatatatatgccttttgctccagtgtgatgacctctgacacactctgacctctgacctctgatccctgacttcatacccagtcctttaacccctttggctcccaagaccccaatccaccataatctctgaccccaaaccatgatcctgatgtcccatcccacaccctgaccctttacccatccttcctctgaggtgtcatgattcgacctctcgccctgcatcccagacttgtacccatcctgacccctgacccctggccctgggccccttactccgtgggtggttggtgatgccccagcctgagacgtggcactcggtgccagcggttgcacagtcattgggcaggggcaggggttgaacgctgctggttacgcggacgggcaggcgcagccgcagcagccggaggtcgtgctcgtggctcgtcgaggctcccaggtagccgggatgggtcacagagaagccgctgtgccggatctgctcggtccagtcgagctggctgaggctgtgttcccccaggcgcacccagtacctgctgccggtggcgacggctgagcgggtggcaggcacgcagtcccccaccttgcacccctccacggacactcaggcgctcctgccgctccccactgttctgcccctcactgtctgtcctctcacccgcaactctcattctccgagtctctcttacaggctcttattcccaacctccatcaccctctttccatcttgggtgttccctgtttctcctaccatgtccctgcatctgtgtctctctctctccttttttttttttttttttttttcaagaccgagtctcgctctgtcgcccaggctggagtgcagtggcaccatcttggctcactacaacctccacctcccaggttcaagcaattcacctgcctcagcctcccaagtagctgggattacagaagcatgccaccatgcccagctaatttttgtatttttagtagagataaggtttcaccatgtgtgtcaggctggtctcaaactcctgacctcaagtgatccgcccgcctcggcctcccaaagtgctgggattacaggtgtgagccaccgcgccaggcctctctttctgattctctcggctggtgaagcccatgaaggcagggacatcagtggaccttgttcactgccttattcccaccgcctggcacggagcatgtgccctccatgctcatgcgtggacgagtgggttcatgattgaacgagtgggttgatgaatggcctctctgcatcctgctgctggccctctctctccctgagtctctgtttctttgcatctgatctcccctttcacaaaaaaagttccaggccaggcacagtggctcatgcctgtaatcccagcactttgggaggtcaaggcaggaagattgcttgagctgaggagtttgagaccagcctgggtaacatagcaaaaccctgtctctacaaaaaaaatttaaaaattagccaggtgtggtggcgcaggcctgtagtcttagctccttgggaggctgaggtgtgaggatcacttgagcccaggtggttgaggctgtagtgagccaagatagcatcactgcactccagcttggatgacagaaagagcaagactctgtctccaaaaaaaaaaaaaaagaaagaaaaagaaaaaaattccagaacatcagtctactgaggcccagagaggtgccaggcatagattctgaagttgcacaaagagtttgggtcatgttggccgggtgcagtggctcacacctgtaatcccagcactttgggaggccaagacgggcaggtcatttgaggccaggagttcgagaccagcctggccaacatggcaaaaccctgtctctacaaaaaatacaaaaattagctgggcatggtggcgggtgcctgtaatcccagctactcaggaggctggggcaggagaatcacttgaacctgggaggcagagacagcagtgagctgtgatcacgccattgcacagcagcctgggcgacagagcgagaccctgtctcaaaaaaataaaaaaaagaaaaagaaaaagagcttgggtgagacctgggccccgggcccagactgggtcaaggaatggctggggtgagtggcagatgtcatataggaaagaaagggtacatgcaggaatgggagaggcaggagggcaggttccaggaccctccccggccctccacccaacatacctcaccctgcccagcaccaccccaggcccactgctaaggaagttccactcctggtctaacctcagactctcttgttgcaggatcagcttcttcccagtgggcaccaccctcccttgtgatcctacccccagcgcttgccttcccatagtcctcccttcgcccaccccaggaagggacttacctgccgctgcagtgagccgctgtgaggacccacctgtggtcaataaggacacccccgcagcgcaggctggtgccctcaaacagccccacctgccacggctgtgagttacgcccacactcagtgccattgaaaatcttcggtgtggctgcctggctgagccctggagacagacaggggcatgggtcagagagaggaagaaaagatacagagatggagagacacacagagtgagagagagaaacaggcaggagagagagaggagaaagagagacgagaaagagagagaaagagagagagacccagtgatagaaaaagaccatgaaacatcaaagacacccagggagaaagatgcttacacataggagggaaatggagagacagagattcagagagggacagaagggaagagggatcaaaaaataggggagaccgaggtgagcagtaccctgagagctgcaggtaaatggaggcacagagaaagcccctctcctcctcaccaccaggctgggggccagagctgagatggggagggtggtggggcctcctcatgggggtgaagggatccagtcgcagtcctgccctctccctgctccgggagaactcaccaagaacacacaggagcaaaaagatgctgagccccatggtgggtcacttccaaagtctgggggaaaaggggaatctcagaggtcaccctttccctgtgccccccacctctgccctctctgcttctctttgaaggtcaccaaggggatgacctgcttgtcctctctctacctgctcccctgtgtgtcactccctcattggcagtcgcctacctccttctcaccttgtctctttgtctgccagatcctctacgtggctgtcactgtttggcctgtcctcgtcgctgctatctctccgtccacctacctgcctgtcttctcatgtgctggccactccgccagccaactctaccactctgcacctggctcctcagccacctgtcatgttgctcaaccggtccctttccttccatctgtcgctccagacagaccactgacaaagctcttaactctctttgtcctggcccatccagtttccgggttaagggaaggggaccacgaagacaggggtggggcgtgctctaattctgcagaaactcttctcagctaatcacacttaattgagctttacagctaaacggagtggggaaggaggaaaggacccagggtgggaagacccagccccactccctctctcctctgcaagcccgtcagcagccccaggactgatgactcaaggtgactagggagctgggttctaatcctgactccagtgacaaaggagggtggggagaccttggacacctggggcccatccccatgcagtgcaggggaggggcagggggaaggagaggctgtgaaagcaggagagtggacgggaggggcaggaagcccaagctagaaagagtcccagaaagagaagaagagttgaaggaacagacttccaaataggtgatcaggcaggggtagaagagagtttctgaactgagttcatatatgtacatatgaagtggatcaatctaattccataaagtttttctttgctaagaacttctattgcttaaataaaacccacagagagaaaaaaaaaagacacagggaaggagaaatggtagaaagagagagagagaatgagtcacaggacaagggaactttgtgctgttttttgtttttcgttttgagatggagtctcgctctgtcacccaggctggagtgcagggctgtgatctccgctcactgcaacctccacctcttgagtacctgggattacaggcacgtgccaccatgtccggctaatttttgtatttttagtagagacggggtttcaccatgtgggccaggctggtcttgaactcctggcctcaagcaacctgcctgccttggcttcccaaagtgccgggattacaggtgtgagccaccatacctggcctctgtgctggtttatctgagtttttgcttcatctaggaggaatggaaggagagaaagaaggagagagagaggggacagagagagaaaatgagaacaaaaagggaattcggctcagaggaagggggattgagaaacaaaccaagagaaaagcagtcagggccaggcgcggtggctcacgcctgtaatcccaacactttgggaggccgaggcgggcaagtcacttgacgccaggagttcaagaccagcctggtcaatatggtgaaaccccatctctactaaaaatacaaaaattagctgagtgtggtggtgcatgcctgtaatcccagctgctcgggaggctgaggcaggagaatcccttgaacgtgggaggcggagcttgcagtgagccgagattgtgccaccgcactccagcctgggcggcagagcaagactccatctcaaaaaaaaaaaaaaaaaaaagaaagaaaaagaaaaaaaagaaaagcggtcagacagagcgcacaaacaaacaaaaaaacccagaacaaaacagaggagagcaaactcccaccctatgactgtcttttagtccttcactttctctctgggtctccagtctctgtccgtgtctcattttcagaatcacagaaccttagcttttgatttgctcttagaaacgacctaactgctttaactcatcattggtcagcgcgactggcgttgataacgctggtccctacaaagcctcctgctggctgttaagagctttccttctttgggcagagaggataaaaaagcaccatgactgtcctttctctggaaaggacacacgtcacacgctcacagcacaaaaacgccacttcttcctttttctggtgtcaagttttacaataaacctcaactgaataagcaaagaaacaaaaacaaaaataccaacaactacccaactcaacctctctctctttttttttttctgtgtagatttttaagagaatcaggtttactgatgtggaatttatatccaataaaattgaatacaaaaaataaggcgggctcgctgattttaaggagcattcatgcaaattaaaaataccatgtatatagttagtaacaatgtattgtgtacttgaaaattactgaccgagtagggtttaagtgttctcactacaagtaaatataagtatggggccgggcatggtggctcgtggctataatcctagcactttgggaggttgagatgggaggatggattgaggccaggagttagaggccagcctgggtaacatagtgagaccctgtttctacaaacaaaaactaaaaaaattaaccaggcattatggtgacacaggcctgtagtcctagttatgtgggaggctgaggtgggaggatcacttgaccccaggagtttgaggctgcagtgagttatgattgtgccactgcactccagcctgggcactccagcctgcactcccgtctcaaaaaaaaaaaaaaaaaaaaaaaagaccagcatgggcaacatagtgagacctcatctccacaaaaagtaaaaaaaagttagcctgggggaggggcatacctgtggtcccagctacttggcaggctgaggtgggaggatcgcttgagcccaggaggtggaggctgcagtgaaccatggtcacaccactgcactctagtctgggtcacagagcaagaccctgtctctctataaaaaaaaataataataacttttattaaaaaataaaataaaataaatttgtagatgaggaatattttgcctccagaactcaacgaggcctaaaatgttttgggtttgttttaatgctgtgggtgctaagagactcaatagctgtttcctggcagtgtctcagctggaggggtcctcactttaccaaatgattttcagaaatttaaccaaggtggggccgggcgtggtgactcacgtctgtaatcccagcactaggccgaggtgggcagatcacttgagaccaggagttcgagacaagcctggtcaacatggtggaccctcgtctctactaaaaatacaaaaattagccagttgtggtggtgggcacctgtaattccagctactccagaggctgaggcaggagaatcacttgaacctgggaggcagaggttgcagtgagccgagatcgagccactgcactccagcctgggtgacagagtgagactccgtctcaaaaaaaaaaaaaaagaaaaaaaagaaaaagatattcaaccaaggtgggaggcctcatactctgtgtggggcactggcccatcccattgtgtgagttcctctagagtatttgtgaatctagaattagcgtatcctatgggcttcctttggacaagggtgtttgtcaccatatgacgtcatgcctgtgcttttggagaaacgtggatggagctggggtgttgcctgtgttgcatgtcagaacgtgatagcccagagtctggaacttcagcatgctgagtgctttgagctgaaggagattggaagacctcaggaacaagaggttctctccaacctcctcctgctttcctctcctctccccttacttctcctttgaagcagtcacagacactagaattccttttcccctgaagaccctcatgtgacaggtgtcctgcagaggaagaaatgcaacacagaaaggcccagaagaatctgaacaaatgggacctgctgggatcccccctcaatttatgaccaagagatcatacctgttttttggtttttgtttgtttgttgagttggttgggtttttttgagatggagtctcgctctgttgcccaggctgaagtgcggtggcacaatctcggctcactgcaacctccgcctcctgggttcaagcaattcttctgcctcagcctactgagtagctggaattacaggcacctgccaccacacccagctaatttttgtatttttagtagagatggggctttaccatattggccaggctggtctcgaacacctgacctcatgatcctcccacctcggcctcccaagatcgtacctggtttttcacatcacatgtctacatgccaacgccttcttcattgaacctcaaaatgacacaattttccctgagtttttgggtcttcatttctgaaggctttcatgtcacataaaactgttaaatccacttgttacgcttttatctcattaacctgtcttttgttataggggtgctggccatggactttgaaatgcataagaaaaaggtattgcgggccaagcacggtgactcatgtctgtaatcccagcacttcaggaggccgaggcaggcagatcacctgaggtcaggagtttgagaccagcctggctaacatggtgaaaccccgtctctattaaaaatacaaaaattagctgggcgtggtggtgtgcacatgtaatcccagctactcgggaggctgaggcaggggaattgcttgaacccaggaggcagatgttgcagtgaatggagactgcgccactgcactccagcctgggcgactgagcaagactccatctcaaaaaaaaaaaggtattgcaccttttcactactgcacctgcagtagtggccaggattcaaggttccccaggagcagctgggtcaggtgtattgtatcctttccacggtgaaggctagctgcagctgagaggctgttgaaatagccttggaacagagcatatcagccaaatccaacgacggtaacgtatttgccagttgctgattctatggaaagtaatactgggtatgggggccttaatggatatgtgatattttgttttgtttttgacacagggtcttgctttgtcgctcaggctggggtgcagtggtgcaattatagctcactgcagccttgatctgagctcaagcaatcctcttgcctcagcctctcaagtagtcgggaccacagatgcacactaccatgcccagccaattatttctatttttatttttagtagagaggaggtcccactatgttgtccaggctggtcttgaactcctgagctcaagcaatccttgatcctccaaccttggcctcctagagtgctaggattacagatgtgagccacctcactgggctggtacatgatgttctgaaatacatatacattgtggaatgactaagttgagctaattaacattcatccttcacattcttattttgtgtgcatgtggtgagaacacttaaaatctactctcttagcaatttttgagtcctgtagtccccgcttatccagggaaaatatgttccaagatcatggagagtacctatcgtaaaatttaatttataaattaggcgtagtaagagatgaaccacaataatgaataataatacaataaaacaattataaccatgcactgtaataaaattatgtgttatgtggtctccctctctcaaaatatcttattgtactgaattgtacccacctattgtgggactgcggttgaccacaggtacctgcactgcagaacgggaaacctcaaataaggagggactgctgtctatggtacattgttattaactagagttaccatgttgtattaatacagtaaatctcttaaacttattcctcttgcactacaggtgcacaccaccatgtccggctaatttttcaaatttttagtagagatgagggtctcactatgttacccagactggtctcaaactcctgggcttaaccgattctcccactttggcctcctaaagtgctgggatgataggtgtgagccactgtgcctggccatcaacttcttataaagttagatgtatgctggccaggcacagtggctcacgcctgtcatcccagcactttgggaggccaaggcaggtagatcacctgaggtcaggagttcaagaccagcctggccaacatggtaaaaccctgtctctactaaaaatacaaaaaattatctgggcatggtgacagacgcctgtaatcccagctactcaggaggctgaggcaggagaatcgcttgaacctgggaggcagaggttgcagtgagcctagatcgtgccacttcattccagcctgggcaacaggagtgaaactctgtctcaaaaaaaaaaaaaaaaaaaagttaaccatatgcttatcatacaattcagcaattctgcttcgagatgtcttcccaagagaaaggaaaacatatgtccacacgatgatttgtacatgaatattcatggaagccttatttataattgctggaaactgaaagcaacccaaatatacaactggtgaatggataaacaagttgtgatattccatactatggaagactgctcagcaatagaaaggaatgaacttagggcagggcacagtggctcaaacctgtaatcccagcactttgggaggccgaggcgggcagatcacctgaggtcgtgagttcgagaccagcctgaccaacatggagaaaccccatctctactaaaaatacaaaattagccgggcatggtggtgcctgcctgtagtcccagctactcgggaggctgaggcgggagaaccgcttgaacccgggaggtggaggttgtgatgagccgagatcgtgccattgcactccagcctgggcaacaagagtgaaagtccatctcaaaaaaaaaaaaaaaaaaaaaaaaaaagaaaggaagaaagaaagaaaagaaaggagtgaacataaacttggatggcggtctcacgatgtcacgatgttgtccaggctgccaagcagttaatctagacctgacttaacccctggggtccttaaaccccataaagccaccattgccatggggaaggcccctaaccatgacaatactgatttgaagctctctggaggaaaaaaaaaaaaaatcaagtataaatataaacagagtagagaggacccaatctcactccaaaatatatccagtaatcattaaaaaaaaaaaagattaaaaaatttcagcattgtgtgggtataccacaacttgtttttccattcaccggttgttgtatatttaggttgcttccagtttctgacaatgataaataaggctgctatgaatattcatgtacaaatcattgtgtggacatgttttcctttctcttaggaagacacctcagagtgggactgctggattgtacgataagcatatgtttaactttataagaagttgataatactgatttgaggctctctggaggaaaaaaaatcgagtataaatataaacagggtagagaggactcaatctcactccaaaatatatccagtaagcattaaaaaaaaaagattagcattaggagatatacctaatgctaaatgatgagttaatgggtgcagcacaccagcatggcacatgtatacatatgtaactaacctgcacattgtgcacatgtaccctaaaacttaaagtataataataaaaaaaaaagattaaaaaatttcagcattgtatgggtatatcacaacttgtttatccattcaccagttgttgtatatttaggttgcttccagtttctggcaatgataaataaggctgctatgaatattcatgtacaaatcattgtgtagacatgttttcctttctcttgggaagacacctcagagtgggattgctggattgtatgataagcgtatgtttaactttataagaagttgataatactgatatgaggctctctggaggagaaaaagtagagtataaatataaatagggtagagaggacccactcccactccaaaatatattcagtaagcatcaaaaaaaaaagataaaaagatctcagcatagtatggaatagtacaacttgtttatgcattcaccagttgtatatttggatttcttccagtttctggcaattacaaataaggctgctatgaacattcatgtacaaatcatcacgtggacatgtttttctttctcttgggaagacatcttgaagtgggattgctggattgtatgataagcataggtttaactttataacaagttgctggccaggtgcagtggctcacacctatcatcctggcactttaggaggccaaggtgggaggatcgcttgagcccaggagtttgagaccactctgggcaacatgtgagaccccatctccacaaaacatttgaaaaatcagctggtaatggtggtgtgcacctgtagtcccagctactcaggaggctgaggtaggaggatcacttgagcccaggagattgaggctgcagtgagacgtgactgagccactgcactccagcttggacaacagagggagatcctgtatcaaaaaactcctcgcaaacgaaaaaacctgctggtcccagagcgctccctggaacagagagctaatgcctgcttgagaccaagcaatagtcacagaatgagatccttcctctgagagctgatggtgtcattaggatgcatgactcaattcaagacacatagagaggtctgggtccagatacatgaaccaggaccactggaaacagggttacagcttcttactccagttcctaaacagcagctcttgaaacttctgacttaggctgcttaaatctgcaacagagggttcagtaggtctcagcaaatgcagcatccagctcaaagagcatgccacccagccggcggcagtgcagtgagcagaaggcaagaggagaaagaccctggtgctggtgctggtggtggtcatcacctagacccctgctcacggcaccaactccacagtcatccccacagaggcagaacaggacccttcggtgagcgtgtggcatcatcggtcttgacatccgaaccaaatttcggatggggagatccatcccattttttgcagatggccacagcatcaaccttcaaggcccaactccaaagtcccctcctccagaaagcctgactggggtttcttgcctcctcattgctcctacgattttatcacttaacttcttagaatgaaaacttgggcttgctcatggaaaagccagactgtaaaatattttaaagaggtttattctgagccaataggagtggtcatggcctgaggaacacaagctcaagaggtcctgagtaagtgcacactgagtagttggattacagtttggtttatgcattttagggaggcaggagttactggcaaagtcatagatcaatacatggaaggcatacattggtttggtctgaaaaggcaggagatcttgaaacatgggcttacaggttataggtgagttcagagattctttttttttctttcttttctttttctttttttttttttacatggagtttcactgtattgcccaagctggagtgcagttgtgcgatctcggctcactgcaacctccgcctcccgggttcaagcgattctcctgcctcagcctctgagtaggtgggactacagccccctgccaccacgcccagctaatttttgtatttttagtagagacgaggttttaccatgttggccaggatggtctcgaattcctgaccttgtgatccgcccgccttggcctctcaaagtgctgagattacaggcatgagccactgcgcccggcctcagacattctttaatttgcaattggttaaaggagtaaagctgtgtctaaaaattcggagtcagcagaaaggagtgtttttagttaacataaggaaatctgttaactaaaccaccaggtcagagcgacctgcacggtgcatgacgtaacccttgcctggcatggcctcaggtcctgtgtataacctggtatcttgctgtcacaaagagtttgtctcctcagctgtaatctctatcttaacattaatgctggtcagttgtgccaaaccccaaaagatagagggtacgatgaggcgtgtctgacctcctttcccatcatggcagggaattaagttttaaagttttttctggggtcccgttggccaaaagggggacctttcagttggtgaggggcttagaatttttatttatttatttatgtatttatttattgagacaaggtcttgctctgtctcccaggctggagtgccgtggcgtgaatacagctcactgcagcctcaacctcccaggctcgagtgacactcctgcctcagcctcccgagtcgctgggactacaagcactcgccatcacgcccggaaaatttttttttattttttgtagagacagggtcttgctatgttgtccaggctggtctcaaacacctgggctcaagcgatccactcacctccgcctcccaaagtgctgtgattacaggtgtgagccacggtgcccggcccgttatctcatttaattgtcctcacaaccctgctaaataattttcatgctctctgctccagaatgaggaaaccaaagcctctcaaatcaccagggaccgccctcaagatcctctaaccagccagggaagagctggaactggagctcaggccacatgattctcctccgccaaaggggaaagactgagcttaactcggtggcttccaacctgctccagcatgaggcctccattttcccgttggaaatgatcgcctagggtggtctcaaactcctgagctcaagtgattctcctcgcctcagcctcccaaacaaagtgctgggattatagggatgagataccatgtctggcctaggtttttatttttagtttacaggtgttaacgcaaactaaatatggcctgagaaggactctgtacttctgtatttgagtccttgtggatgaactgtaacctagcttaataggcaggcagaatcgaaaacctaacttagtagtatgcacctgttacatctgctaagtcttggccaatcccagcagccatacttcaaccattcatacactgctgagtgttcaaactgtgttcaaataagacatatgccgagctgtaaccaatccagccattctgtacctcactaccaatttctgtacatgatttctctgtctctctcttttttttttttttttgtctataaatctttgtccaccacgtggctgcgctggagtgtctctgaatctgctgtgattctgggggctgctcgattccggaattgttcattgctcaattaaactcctttaaatttaattcggcaaaagtttttcttttatcacaggcttatattccccactgccctcaatagcctggaaagttccacgggggcccagctacaaagcctcaccctggggcactggctgagcttggcctgactctccaggctaacaaggtgaagtccatggggccatcgaagatgcggttccattaaccaggatagggttaaatcaccagcgattttccctagtgtaggtccattcttctgtaagatggagaggatgatattccacccagctgaggccttgggagaatggaataaaaggacttccagtgctgtgccaacctggacaaatgccagaaagcctggttcgtcttttgacaaaatcccccttgattccccattttgcttttctccctttctttcttccttccttccttccttctttcctttctttctttcctttgttttctttctttctttttctttctttcctttctttctttctctttctttctttcttcctctttcttctttcttttctctttctttctcctttcttttcttctttctctttctttctttctttctttctttctttctttctttctttctttctttctttctttctttctctttctctcttgctttcttgctttcttgctttttgtgagacagagtctcactctgtagcctaatctggagtgcagtggctcaatcttggctcactacaatcttcgcttctggggctcaagcgaatctcctgtctcagccttccaagtagctgggactagaggcatgtgccaccacacttggttaatttttttgtatttttagtagagaccgggtttcaccatgttgccctgggtggtctcgaactcttgagctcagggagtccacccgccttggcctcccaaagtgctgggattacaggcgtgagccactgcacccggcttctccccctttttcaaggcttctccatctcctggctccaccagttctctccaaattctttccagtgcaggcttccattgttattaaaattcccctgggcaaaaacaggaagaggagggcaggtggctgagaaatcccagaagggggaggagggagggaacgctgagtagctcaccacctggccggccttcctgagtcgaggtggtgttgatagtcagaatctccagcccagctatgtcattattttctgttccataggcaggatttgggtggctgcctcctactctccaaaatccacaggtgtcactcaaggcagctctcctggcactgggaccttggagacagcctcgtagttacactaataataagagcaacaacaatactgaaaaaaatgacagctaccacttattgagttctcactctgtgcaaggcgttcttctgagctttccacaggagctcaattaatcctctcaaatgcattccacagtcagtgctgttctttttcattttaaaaagtttatgaatacatttgggtagtccctaatcctccggtggaaagagttgaattcgttggtggcacattttcattagtgatttggagaggatccctcttttgttttccttatttattttgttcccttttatttcccttcccttctactattgtctttatcattgtgcacattttgccgttatctttgtgaacgtgtatcctttgctattgtttttattattgtgtatccttcgcaattattttcgctctcttgtctcctttacagttatcctcattattgtgtgtattttgctgttgtatttattattgcatagccttttattaagttgaaattcacaaatcataaaattagccacttaaagtggacagttcagtggcgttcagtacattcacgacgttatagatctttttattagtatatgtccttacaaattgtgtgttgttttgtgtgcatttgaaattcatatcaatggtattgtggtacgtagcttattcttttctttccccccgccccccgcgcacagctgtgctttttctggccgggcactgtggcttacgcctgtaatcctagcacttttagaggctgaggcaggcagatcgcttgaggtcaggagttcaagaccagcctggccaacatggtaaaacctcatcgctactgaaaaaaaaaaaaaaagcataaaaaatacaaaaataagctgggcatggtggtgcctgtagtctcagctactcggaaggctgaggcaggataattaattgtacctcggaggtgaaggttgcagtgagccaagatcacgccactgcactccagcctgggccacagagcgagactctgtctcaaaaaaaaaaaaaacaaaaaaacaaaaaactatgctttttcattttctaataatatattatttacataaaataaaattcatccactttaagtgttcagtttggtgaattttggaaatcgggtggaatcatgtaagcacctccataatccaaacataaaccagctcctccctgtctccctccctcactgccctcatccttaagctgcctgccttctgccccttttgcaaaagctccccgcaggtgacactgacgggcactctgcctctatggttttgccttttttagaatgttgtatacatgtttgtcttcttttactagcataatacatttcagattcatccatgtttttgcgctgataaatacactcatgggaaggacattgttttggactaaactcttggactaggccctagcagaacagaccaaaccagaatggagtcccttgtgctaattgccatgtaatcaaactgtttttgaaaataacaaacaaacaaacaaccaggaggtttacagtaaggaatcagaaggggcccagttgacctgagctggcaggataagagagttccctctgtcttaaccctattaaaaacataacgttggaaagaccaatccacgtattattccctatttctgtttccttcatcccttttctgcctataaagccaaactctgctcagctcatgggaacaccattctattttgtggaatgagatactgcccatttgtagaattgcaactcacagtcgattagatcttgaaactaaatgtgttgtaatttagtcttttgaccgcatatcaagagttcattcctttctattgctgagctgtattccgtagtatgggtataccacaacttgtttaaccattcaccagttgttgtatatttgggttgcttccagtttctggctattataatacaaataaggctgatacaaacatttatgtatcaatcattgtgtggacatatgttttcatttctcttgggaagacacctcagagtggggattgctggattgtatgataagcataagtttaactttatgagaagttgcggctgggtgcaggtggctcacacctgtaatcccagcactttgggaggccgagaagggcagatcacttgaggtcagaagttctagaccagcctgatcaacatggtgaaacgctgtctctgctaaaaatacagaagtaagccaggcatggtggtgggtgcctgtaatcctagctactcggaaagtcggtgggagaatcgcttgaacctgggaggtagaggttacagtgagccgaaataaatagcaccactgtactccagcctgggcaacagagcaagattctgtctcaaaagaaaaaaaaaagaagttgctggctgggcacagtggctcatgcctgtaatcccagcactttaggatgccaaggcaggaggattggttgagcccaggagtttgagaccagcctggacaacatagtgagacccccatctctacaaaaaatttgaaaaattagccaggtatggtggtgtatgcctgtagtcccaactacttgggaggctgaggtgggaggatggcatgagcccaggaggttgagactgcagtgagttataattgtgctactgcactctagtctgggtgatggagtgagaccctgtctcaaaaacacacaagcagcagcaacaacaacaacaaaaagaagttgtcaaatgttttctaaagtggttgtaccattttgcattgccaccagtagtgtggtgccagttgaacttggcccatatctttgtcaacacttagtattgtcagtcttttaaattttcaccattgtagttggtagcactatacctttaagatttgattcctgctaaaacggtgaaaccccgtctctactaaaaaaaatacaaaaaattagccgggcgtagtggcaggcgcctgtagtcccagctacttgggaggctgaggcaggagaatggcgtgaacccgggaggcggagcttgcagtgagccgagatcccgccactgcactccagcctgggcgacagagcgagactccgtctcaaaaaaaaaaaaaaaaaaaaaaaaaaaaaaaaagatttgattcctattgctgtctctagtttgttacttttaactgctgcaaagtcctccatgggggaatccaccacattctatcatccactcccccattaataggtaaccaggtttcttctaatttccaccacagcaaaatactgtgtgacagagagcttatatctctgcccctttgtgatgtgcataattattacctttgtgtagacatccagaagtggaactactgggtcttaggatgtacatatacttaattcagccaagcaatgccaaattagtttctgaaataaccacaccaatgtacgttcacaccagctgtgcacaagcgttcctgtgtttccacatctctgctaatacttggggttacttaactttgaaattttcttaaatccatctaacaaatgtaaagcaattgttatttgtatttgtgtttcttggatacctaatgagtgtgagcatattttgtatgagttttttgagtttccttctttataaatctgttcatatcctttgctcattattcttattttttttttgcagtacttccttgcatatttgggtcaatatgtcaatcttaagtcaatagtacagactgcaaatgtcacctctcaagctgttacatgttgatttaccttgtccattgtgtcttttgatgaacagaaatctttaactttgatgtaatgaaattaaacattattttgcctttagatttgtctttctgaagttttaaaaaatccttcctcaggccaggcacagtggctcacgcctgcaatctccgcacttcgggaggctgaggtgggcagattgcttgagcccaggagtttgagaccagactgggcaacatggcgaaactctgtctctacaaaaaatacaaaaaataggtgggtgtggtggcatgcacctgtagtcccagctacttggcaggctgagagatgggaggatcacttgagcccaggaagttgaggctgcagtgagctgtgattgcatcactgtactcccgcctgggtgacagagtgagaccctgtctcaaaaaaaaaaaaaaaaaaaaaagaaggggaggaggaggaggaagaaaaagtccttcctaatccccaaatcacaaaaatgttatctgccattatcttcttctttttttttttttttttttttttttttttttttgagacagggtctcgctctgtcccccaggctggagtgcagtggcgcgatctccgctcactgcaagccccgcctcccgggttcacgccattctcctgcctcagcctcccaagcagctgggactacaggcatccgccaccacaccgtataattttttgtatttttagtggaaacggggtttcactgtgttagccaggatggtctcgatctcctgacctcgtgatccgcccacctcggcctcccaaagtgctgggattacaggcgtgagccaccgcgcccggcctctgccattatcttctattaactttgtagtttgaccttttgcttttaggtcttaaagccatttggtgttaagcaccattgttatacgtacttgagtaatgggaaaactgaggcacacagaaggtgagtaatttgaagactatacagttcaacaagtgacagagctagtattcaaaccgaggcagcctggcccctgaaactgtgttccgtagctactgtgtcatgctgcttctccattgaccaggatcggtgattcagaagttgctgtgtgcagagcctttaaatgccaatctttcactctgtcctcccaacagccctgagcagtaaggcctgttattaccagattaaagaactgaggttcccaaaagataaagtggcaaaaccagatctttcagactccaccctttgtgtttttgaacactaaactatagtctcccctgaaataaccaggaatcacgcaggaatcatcctcaacattcaccctcacccccacagacacagttgatcctcattattcatgaaatttgtattttcaaatttacctgcttgataaaatctgtgggtagcccccaaaccaatactcttgggacttttgcggctgtttgcaaatatgcagagtggtgaacaatttgaattgcctgaggtgcatgctcccagctgaggtcgattaaggcgatgctgtcccttatttcagctctcattctgtaaacaagtgtcctttttgtggtctagttagtgccacgttttgcacatttttgttgatttcgctgtttaaaatgccccctcaggacagtggtaaagtgcgtctagcatcctaagtgcaggaaggctgtgatgtaccttatgggaaaacacacaaagctgggtgcagtggctcatgcctgtaatcccaatacactgggaggccaaggtgggaggatcacttgagtccaggagtttgagaccagtctgggcaagagagtgagaccccatctctacaaaaataaaaaagaaaattagctgggcatggtggtatacgcctgtagtcccagcaactcaggagctaaggcgggaggatcacttgagcctaggagttcagagctgcactgagctacgattgcaccactgtactccagcatgggcaacagagcaagatcctgtctcaaaaaaataaaatgaataaaataaattttgaaaaatttaaaaagaaaatacacatgttagagaagcttcattcaggcatgagttacatcgccatcggctgtgagttcaatgcatgtatattaagctgtctttaaagagaaacacacctaaaacaaggttatatattgatcaggtgacaaaaagattgtgaccagaggctcgaaggaacctatatttcccccctagaagcaatgctttaatagttgctaattcagtgttagaggtgactttatagaacgtaagtaactactgtgaataatacgattgattgtattgccgagtttcctcagtgtgactgcaaaacgctcattctaatccatcttcatctctgttggctgagccatcatcttacccactgattactgcagtaggcttcaggttcatctcctggcttccaatactccctcctggtaccttgtctccaccagtaacccagcaaccagagtgataatccgatttcagatattcctcccctgttgacactctccaggagctcccccactacaatgggagaaagaccacctccctgactacagctaaaaagattccgaatatttggctccagccaaatcctccagtctcattccctacccagtcactcgttcatcattactgtacagtcatgctggcctgccctcagatcctggaataggctaaactcaaggacgttggcccagtggtttcctttttcagaggtatttcccccattctttgctaaactggctccctttaaccctttggccacatgccaccttctccgagaagcccttcttgatcaccctattcaaaacagcctcctcctttattctctaacacaaatccttgcttatatccttcatggaaatgattgcatttgttattatcatcacacagaaatcatcacaatctgcagttatttagtttgtgtagttgtttcttttctttctttttgagacagggtttcagtttgtcacccaggctagaatgcagtggcgcaatcttggctcactgcagcctccgcctcccgggttcaagtgattctcctgcttcagcctctgagtagctgggattacaggcgcctgccaccaccagctaatttttgtatttttagtagagacggggtttcaccatgttggccaggctggtgttgactcctgaccccaagtgatccgcccgcctcagcttcccaaagtgctgggactacaggtgtgagcctccatgcctggccatagttgtttattttctataaattctcagagaacagtttatttccacttgagtgtctaataaacagttcaagacaaaatttcctcatctctgccctaaaacatgttcctctcagtttctcgcatttttgtaaatgaaagctccatccttcctgttgctcaggccaaattgctggagtcatcttcgactcttctctttttctcacattcccccatctgatgttggcagatatggtccaacagtcccatcaaacagatccagaatctgacctctcgcctcctctacggccatcaccttggtccaggaaccgtcaccttttgcctgggctaatgcagtcccttcctcgctgggccccctgagtctgttccccatggagtagccagaggaatcctgcgcacattgaaatcagttcaagtccctcctctgctcagagccctctcatagctcctggctccctcagaggaaaacaaagtcctcgtcgtgccccacaggacccaatgcagtctgctccgttcattctctgccctcacctcccaccctctcctccttgctcactcagctccagccacaccaaccttttcactgatcttcagacacaccaaacaggctcctgcctcagggcctttgcactagctgtatcccctgctccagcagctgctcctcagatatgtgctttgctccttcccttcatcctttcggtctttctttaaatgttaccatctcagttaggtcctcttccctgaccatgctgtttaaattgcaatgccaccccttccacatatacaaccctacattcccaattcttaatcctttcttctacctcttcctcttcctcttgctctccttccccttccccttccccttctccttctccttcttcttcacagggtcttgctctgtcacccaggcttgagtgtactggcacaatcacagctcactgcagcctcaaactcctgggctcatgcaatcatcctgcctcagccttctgattagctgggactacagacttgtgccaccatgtccagctaattttttaaacttttttgtagagatgggatcttgctatgttgtccaggctggtcttgaactcctggtgtcaagcgatcctcccaccttggcctcccagtgttggtattacaggcatgagctaccacatatggcccttgtttcatttcttgctatggcttgcagcaccacctgacagcctatttctttattcattgttatggagacttcttgaaaagaatgtaagttctacaagggcagaagtttttatctgtttaactcattggttatcacttgtctctgcaacagtgcctggctcttgataggtacaaatatttgttgagtaaataaactatatttaacaacacccaggagagtgcttgcacatagtcaacactgaagaaatgtctcctgaggaaaataaatcagtgcaacactttttttggacactctgcaaattcgaagggctgttattaacattctaaggtaatattttatgggaaccatgcaaataataatagtgataaatgcttgacatttattcttgtaataatgttacaattaaaaaaaattatgaacccattttacagatgagaaagcacagagactgtgagttttataacttgtccaaagcaaggatttgcactacattttagggtcatgcacaaagatgtaacagcaagggacactgaccaaggatgttcatggaggggatacaagacggaatatttggtagacaataaagttcaggcaagaagaccctttggtatactgaaccctataactctagagactagggtgccattgattcagagagggaatgttggcagaggtggggtattggaagaatgtgggatgtaggttgggttgggacttctgagacacccataacagtgtgagaatgaaatattctgaggatccaatgttagctgtggtgagtcacagaggtacacagaatgttgtcagggcagaagattgtgggcataagagaatattttcaggatgaactatcatgggagtctagagccttcttgagtgcaaaaaatagaaggtctaggatactggcattgaataaatacttgaagagttagaggatgttgtcaaggatggtccatttataggacatatattgttgagatgggctgatggaaatatttaagaatgtgccacagacagaacgttcaggtggtgatctgggctcatagaagccacactgatgaagttgagagacctgggccattgtctgggttgggacattcaggttgttgagatgtttcagggatgcaacatctgggagactgcaagcctggcagtgcctgaatgcttctgaaacatggaatgttagctgagattgagcatttttcaggacatggatcactggttcaaatggaacactgggaataaggagcagagaagggctaagcagaccatgtgaggaagtcatggtgacaggatggaagccggtacatttctcaacttttattgtgggcccttcaaccatttttgctgctgggtttcatattttcggattgtttcacggatccacaggacgtatcttgagacacgggtgtagacaccaggccggtcaggttgcccacatgggaagtctccccaggagacgatgccatacagtgttctgttacagaccagggggcccccagagtcaccctgagttggggaaagaaagagagagagaggtgggtccttgctggggctaaacaaggcagggacagggaggtgtggggagagagtgaaagatggagagagacacacacagagaaggagactcagagaggcagagtcagacacacacagtgtgagagaaagcaatgaagacagtgagaaacagacaagaagacaaacacagagggacagacagcaagagacagaaatagggacagaaagacagagataggcccagagaaagagagacacagagaaatttctgtgtttttctctgttcctcagtttcattaaaatggtaacaacttacttcatacccatttttgtttccctggtactaaatcaccccctgccccacaccagctgaccctgctcctatttaaggctcatttgtgtctctcactattgagtgaacccattcatatctgggcagggtatgcaacacacgtgtaagtctatttctcttcctgggcccaaggcagacatcactaatcgatcaaggcacatatcattaatatagtatcatactctttctcactgaatccaatctcaacttctttattgatgaaggctattttttgctcatgtagtatccatttcctcttatttttaaaaaattaaacattcatttttaaatttttatttatttatttattagagacagtgtcttgctctatttatttctttttgttttagagacagggccttgctctatcacccaggctggagtgcagtggcatgatcatacctcactgcagccttgaactcctgggttcaaatagtccttctgcctcagcctcccgagtaactaggactgcagttgtactccaccacacctggctaatttaaaaacttttttttctttttgtagagacagagtctcactatgttgcccaggctggtctcaaactcctgggctcaagtaatcctctcacctcagcctcccaaagtgctgggattacaggcatgaactactgtacttggccatttccccttattttggtaacagcctctcctgattttttcatttggggaactgcccttctccacttccaatccatgcagtttgtccctgcccctctccagcacccacagttaactatgtgactcaggcttggcccatcagagaatcccacagctctggtggagtgatggctcaagacacatgacttaggtcagcctagtgagaatcatgcttaagacttttgtgtgaactattggaaaagagaggttctctttctaatagggttgcctagagggtaggatgtaagctcaaagctgctggggccatcttgtcatgggaagaatctaaccgagaatgaagccaaaacagaataaagaagagctgagagttaaaagaaagacagaattccaaacacacaatttgcatacctggatccatctgtgcctaaagccagacaacctggattttcagttacaaaagcctgcattttgtttaagccagtttgagttggttgtctatcactcacaagtgaaagaataccaacctttatgcatctcaacacagggatcttggcagccactcagtcaaagctggggcttatgatgaattattcctgccatccctgggtacccctttttgtcttgacctcctatgtgaggggacattgtatcttataaagattggttcccctaaggctggaaacaaagctttttccccagcatctgtcacttccattctggctttctatcctgtccaaggcacccaccagcctcccggcctcacctcacaggagtctttgccaccctcttttgtgccggcacacaacatgttgtcagtgatctttcctgggtagacttgacgacactcctcatctgagcgaagttggatgttggcacattgtagagttttggggtaattcactggggagaagaaagagaaggtctaaggtatccgacctggataggatatgggatgaaggtgaaataggcgagttgaatgggtaaagagtagatagaaaattgagatgggaagagaaagatgggagaagagatgagcacctatctgggtaaagcaacggaagtgacagaaatatggagggacatgggagagaggcgaagggagagatgaggagaaaagtggagggaaggacaaggagggaagggacaagagaatggaaggttgataaggagagtggtggagccagcggtggggagagaaagttggagagagggagttggaatagggagatggtcagaaatagagaattaaagatgggaaaagcaggaacagggatgggaagagttacgggagagttggatagaatggtaggaagagagacagggcatgttgaggagaaagatacaaacatgaggctgggagagagtcagggattgctagggagatgcaaagggctcttgtcggtatatacatcaactttatattcacatatataatgtattatacttactaagtaatgatatagaattaattattacattgaattattagacatttcattaataaccatatttaatatattaaacattttataaattatagaaatataaacattttatatgtatgatttatatattataaatgataaaattcatttacagtatataaatatataaatgtatacatttataaaatacatttataatatataatttaaatatagattatatataatatatacattatgcagaaatacatatttaaaatacataattgataaattttataatttataaaatacatttaatttgtatactttttgtataatatataattatattactatataatacataatatacatcatataatatattcatatattagatctatttatatttctatatattcatgaatttatatactcatatttttatatattcatgaatttatatttatataaaggatacagctaactttaaatatatatatttatttacttatttatatttttatatataaaggaacctacctcagaccttccctcccatctctgcccctgtttccccagccactcctatggggcctcaggccacctgtgtgggtgcataccctgggggctggtggtggtgccccagccagacacccgacaggtggtgccaggggttaggcggttgttgtgggaaaggggcagggtttggatgtagcctgtgagctggaccggggactgcagctccagaagcatgatgtcatggtcgtggttcaggtgggtggggcttctccggtattcagggtgggggatagagtggacaacttccctcacctgctcaccagcttccacacgccctagggcgtgcttgcctaggtaaactttgagccccctgtgggtgcagaaagaaggtggttaggaaagaagatgagcccatttccatccccatcccagccccaacctcttcccatccccaacctaacttcttctccatcctaccttcctcatctccaaatacatctcccccatcctcaacttcaatcccatccaaatcccctactttgattctattcccatacccaatccccatatctcaaccccaaacctcattctcactcccatgtccatccccaaccctaactccaactccatcctcaaatccaactctaccccatccacaatcccagtcccattctcatccctaccccatgctcccccggcccccacatactcctttagacagtgtgcggcagtgaggacccatttggggtggaccaggactcccccacagagtagccgcccttgcactagtagggcagcctgccagggctgagagtgggggaagcaggtgtagccacctgggagaaacccactggtcccattggtgttgagaaccttggaagactcctgggagacacctggtaaagaagagagattgttagaaaactgggatccagggggcagaggagccctggggttgtggtttctgggtttggggtaagggtcggattattgccctgggtgaccaggaactgaagatgaatttgccgacctatggcagttgctattcttgaccaagtggagatgaattagggcaaaggggtgacattattttctcaggaagtaccaaatcctccactgggggttaacagaagagttcacaaaatgaggatgttgctgataggtaagcaggagcctgactttctctccacatgcattttttatatcattctaccagaagatggatttcaggaggtagaagtgagactgacctacacatccacctaggcaatatctatccatcaatctatccaatcatccatcccccattcatcctattgatttgtccatccgtctactcatccatctatccattcatccatttaggtagtcatctaaccatctatccatccatccatccatccatccatccaaccatccatccactcatctgtccctccatccactggtccatttattcatccatccatccatccatccatccatccatccatccatccatccatccaatccaaccatccatccatccatctatccatatatccatccatgcatccatccaatcatctttccacccatctctctatcctttcactgcatatatactggttgcctccatggctttaaataccagctataggctaatcatctccagccctgaactcttctttaagctcaaaactcaaacactgttgatttggatgccttacaggcatcttaagctttgtattcccaacttgattcttctcaatcaaaactgttcgctccagtatttcccacctcagtgctcagccccaaacctgggagtcatctttgcttctcttctttccttcatcactcacaaccagttcctattggttttatctcccaaatatccagttatctccacacttctgccaccatcttggtccatgccccatcttctgtagcccaaatgactacaacattaacctaaatccttccacttttacatccctccgatccagtcttctcaaagtaggctgaggactcttcaaacaaagaaagtcagatgttgttcccaggctcaactttctttaaaataaaatccaaaaagccttcccaaggtgtgcaggactctgtgctgtctggcccttgccagcctctttgaccccatctccaacctctttcttctgacttcctctagtccagcctcatgggcctgttcttcaaacacaccaggcatttaaagaaaagaagaatttaaatcatcttggatgcccccatactagacattttatacttgctatttcctctctctgcacagtcctttctccagacctatgttgtttaatatggtagccactagctacatgtggctatttaaatttaaactaattaaaatgaagtaaaactaaattaaaaattcagttcttaagtcacaccagccatatttcaaatgttcaatagcctgaaggggctagtggataattggacagcacagatataggatatttcatatatacatatatggaatattctactggatgaccctcagaatttagaggttgtatgtctgggtccttcttaattctgagaggtcagctcaaatgtctcctcttcagaaaggccttccctgaccacctggtctaatgttgactctcctggtcccgactcctcccccattacattcttccagttggtcttcatcagaacaatgattgctattcatttctcttcacatttgtatgtattcgtttttaaaaatctctccactttgactgtaagctccattgacaacaggcaccttaactgctttattcagtaccatattcccaggacctaacacagcgcctggcacacaatgggggctcaataaataaatgctgtgtgtgccaggcactgtgtctggcattgaaagcacagcaggggtccgtgggacagggagaatccaatcctgaacatgcatgccattttgtgactgtgtgaccttatgcaaatcaccagcctcagtttccccagctgtcaagtagaaaaagtaatagttcatctctcattgcgcagttgaagaattcaagatgatcctgcatttcaaaccgtgcagcacagcaggtggcatggagagcactcagtcagtgggaaatgttattattaattattagctacaacaggaggtccctctgcctccctagctagtttccccaactacagggcaagcagttggattagctcagtggtttgcagttagggacagaagttgtcggtgagcacaggatcattttagatggtagagagatgagatttaagtaacgttaaatcgcacactcagacgctgaaccagcatccagttctcttttaaacctgattttgtcaaggataaagtctcaggatggtgctaatatggttttaacacctccctaatcctcactgagctcacttttcaaagccaggaggacacagaagcctcatcaggccacctaacatttattacactgaaccatctgcaaaagttgttttaggaaggtcaaaaagggtcaagtatcagcaatttcaggtggtccaacccaataaacatattattttcttttcattgtgcaggatttatttccttccttaccttctatttatgacaaagaattctattctctattcaggacagtaatataaagttgaacatgcttttgtttgagtgaaaaaagaagaaaaaaagctaactttaagcaaatgattaggtcaaaagttataaaaatggttttcagagcctcaagtccaggatatggacagggaaaacaaccttgattaggattctgactcaggcatcgccggtgtcattggagcaggagccttctgtctttgagtcctaggtttctctgccatgaaattggagtaattacaatgcacctacctcgccaggttgttgaggactccacaaggcgtagcgtgtgggtctcctagcctagggtgtggcactcaggagtggcacgggcatgaatccagggagtgtcgccagaggagaaaagccaccccaccttcaggccaaggatggtgccaggtgccaggcacccacagatccctcctttttcaggtcttggctcaagggtcaagccctttgggaaggcctctggtcgggaagccgccattacatctctaggcccctggcttggctccttgaagtcttcacctcatgtcaagataattattaactaattatttggataattgtttgaataacatctgcgtctgtccccgctagactccaggtgctgagagcagggactgtgtctctgcttgtacagcacccagcacagtggccggtgtttaatagctgtttgttgaatgaataaatgattcatgaacggggtttccagagaacctgcctacaacggcagggaaagatgggaaagatccataaggatcttaaggactaccaatttggggtgaggtcacataggtttggggtcaacccaaggattaaaataacaatctagaaggttctggaaggggctgagtatgaagacagaatactagaggccgggctcggtggctcatgcctgtaatcctggcactttgggaggctgacgcgggctacttgaagttagaagttcgagaccagcctaaccaacatggcgaaaccccgtctctgctgaaaatacaaaaattagttgggcgtggtggcgggcgcctgtaatcccagctactcgggaggctgaggcaggagaatcgcttcaacccgggaggcggaggtttcagtaagccaagatcgtgccactgccttccagcctgggagacagagcaaggttccatctcaaaaaaaaaaaaaaaaaaaaaaaggaatactactaataaagtaataacggctaagtggctaactttcaagtcccttctacctgcgacatactgaaggctcgacgcattacctcgtttcaatattcacagtgaccttctctggtaagcacttatagattaagcccattttccagatgaaaacaatttaggcacaaagcagctgctaggctactggctcaaagcggcagcgtcaggacgcgaacccatgtctttcagctttccagagaggacaggaagccttgaacgcgggaggggctgctgcgagggtattttgggaggtgaagggtctggggtcggagggccaacctcagccgggaaaccaggtcacccagggacaagcaggaagagctctgagctgtccccactggacccggccccgagtgggcggggggcggagctcgcggctcccacgccccctccccctccggcctgacccctcctaccattgtcccgaatggccgccgcgcctccacccccgcgcattcttacctcctgacaaggccaaggtcagggaggcgatcactagggccaggggccacatggctccgggatcgggaggggagggcagggcgggcggggcctgaggagaaggtgaagggggtgttgagggcgtgcccggaacctccgcgtctgaaacctctctgctcctgaatgtctcctcgcctcattcactcttgacagccctgaccctggaatctgccccccgcctccaattccatccttggtgggggtgcagtggcgaggtgggaggaacagtgtgcaacctcctggggctccggcgtgcagcccctcaccccaggaagccgtccctcctcccctgccctctggcgagctgggtggtcggtgcactctcgcccttttcctccagagtctgccttccattctacccctctgggtctgtccacacgcttggtattagcccaagttcttatctgtccgcgcccttcgcctctctccgtctctgcaggtttctctctagatctgagactctagcttcactctccctctccctgactcagctgcccttctgctttccccatccttcctatcccctcttctctcccctccctgccctcctccgctccccgcccccgccccaggcagaccctacctgagtgaggggcccacgaggagcgtcagccgccagctgtctagaacttcagccccgaaccatggcttttaacccctgaactccctcccccagctcactcagcatttcctggtccctggcctccccctctccacccccagtggctcagcgggatgtctccaggcacccccgacctgggcttggccctctgcttggggcggagcttccaggacgtgctgggacctaggtctgaccccgcccaaggcagagttgaacccactgtgaactttcaggcctcaggacccaaaaaagggtaaggggaaagcccatttccttccccctaccccgctgagttccatgcccatccctaacttcaacccattctgcacccagttttctaacctcttctccaaccccatgcataattcttaataggcagtcagcccccagatggccgtgttctatcagattcccacctccctatccatccctaaccataccaagtactccagcctgttcctcaaccccagtcccatctccaacctcatctcaggtttagctctcaacacatccaggttccaattcccagtctcatctcaaccctttttcttttgaaagacacaaggacacccacaattatcccatcatcctgcctccctgctcccgccaaccaccggacacaagaaggaaatcatcagctgggtggatagaaaatcagctccctcggacttggatgggggcagagatgcgacctgagaaagcaacattttccagaaatggccttttaggagcagggccagagggggtgagggagtccacggggacctaggtggagaggaaaaagcaggagccggaaagctttgaagacgtggattgggggtgggggagaggaaggaggaaggggtggtgttttgagaatgagtaggtgtctccaggaactatgactgggtggagccctgagttaatcctagggggtggaggggacaggattagggattaaggactgaggtggggtcagaatttggaagaaagccagggacgtggaccagatgaagtttggaaagagtgagagagtggaggtgtcacaatgaggataaagaatagagatggatggggcgagggctcacatggaaacttgtacagtccttattgatggagttcagatttggatgtggagatcaaatctagtgtcaaagggtaacttttaaaacatggtcttaccatgactctctgacatatatgaaatgaacatgtgtcaaagattgtatcttgactcattaataaatggcagagccagtaagatgttacaaagagccatatgcacagagacaacgaggaatgctgaaatgaatttacaaatagatgcaaaactggctattccacactgggaggaggagggaaatccattgtacttccacctggcaaaattcatgtaaacatttatggacaagaattatttgcattgctctcagatacctacaatttagagtcataaagtggctcaaagacaggaaagggtacagagacctcataaaatcagataacccatctaactttgcattggcgacacctcagtgtccaatgttgggtccatttcaaagtattttgctaagaagaaaaatatggcttaatataggaaatcagtagagtctatggttaaggatgggcctgatgacaacattaggaatgcaatgagtttggggaggtgaatgaaaattggatgaggatgggtatagagttggaggtggtagttgagctggttttgggataggattagattgtaagatgggaggtatctagggataagttggtgttggggtactgttgggttggggctgaagatggaaccaagattgaggttttggatggggaaatgttaagatgtggttgagctggggtagtgggttgacatgggtgatgaggactggccatgaggttgagtgtctatgatgcagtaggttttggtgggggtgagctgggtcataccccacctctcaaggtgaaagaaaggtcactgtctttctccaccctggacttctcccacctcacagggcggggtctgagttcactttttgagtggaattgtgttcaggtggtgtggctggaggtaggatgccaggttaagtgcggcaaccagcttatgtgggaaatcggggtacttgtaccctcctgtgacctgggtccatgcttccagagaagcctttctcacttgggaaaagctggagcctggagtgagggtggttggccttgttatttgctgaggggtgagtgccaggtcaaattgatgttaggggttatgattggccgaacgcgggttgggtagctctggttgaagtgaggtcatggacccactgagggctgggcaccttccaccccctcacttgatgaacaagcccacggctgaaagtcacacacaaactggaccaaatccaagtgcgcttctgtcacaggtgcaggtctttcctccaccacagagaaccgggctggagaaagaagaagaaaggacccgaaaaagagatggtgttcctagtggttctgacctcagactctggagctagactgcctgagttcagatgatgtgactgctctgtgcctcagcatccccatttgtaaaatggcacaatcaatagcacttgccttatggagaagggttaactggattaatacccaaaaatgcttcgaagagagtgtggcatggaccaagggccacaatgctcctgttaaataagtaaagcttaagatggaggcatctgacggttccaggaggcccctccctatcttggcttcaaaatgggattctttgtcaagcaggaactggaacttctggttggaagtgctagctgggatgagaaagtaggccccacacccaggcccagaggaggggccccaacgcaaacatgaagggaggggaagactgagagatacaaagggctaaatacacagagacagaaagatggggcaggtgggagaggacagaaagaaaattcagaggacagaggcacagagatagaaagagagagatgcccagtgagaagcagactcttggtgagaaagaggcacagagagttgagaaacatggattcttctttagagctggatccgtgttattcaggatgtggctccagtcatcatgcatcccaggcagcaataacacatcgctttcatccatcagaatagcaaaaattagaaaggtcggtcttgccacctacctgcgtgcccacatcctctgtctcctctcccatttctctagatgaacagtctgcacctgcagctaagatagatgcctccactggtgctggtatcctgtcctctcttgccttctggagggcattgctccagccagcagttctctgttctctttcctgcaacatgttttccttcttctccaaggagcagccccattagcatgcaaatatactacagtttctcccatctctcgttaaaatttgaaaaccaaccaacaaaaatttctccccactctcatgttctccttcagctcctggcccattttctgctctgtacaactgcaatccttccctaaaaagttggctaagctcactgcctgcaattcctgtcctcccgtcctccctggagcccacactatgaaggctttctctcccattgctgtaccaaccatgcccctgtttagggcaacagtgacctccacggtactgaatccaagggccgtctcttcaggttcatcttactggagttatcagcagcatttaacaagtggactactccctgtttctttccttggcttctgggacactatgctctcctggttttcctcatcactcactggttgattctcatccgtgtctggaggtggtttcttcctgtctccccagtctctacatggtggagcacctcaggcttcggtccttggccttcttctctcctctgtctatattcactccctcggtgatctcatctggtctcgtggctttaaataccatctacatgttgacgactcccaaatttatgtctccagccaggtctgactctcaaactctccacttaacatccagctgcctactcaacatctccatgttcaaaaccaacttctgttctctgcccttcccatgttccaaacatacttctcttgtgggtcttgggcttctcagcggatgttcacaccatccttttcattacctggtcaatacttcagtctcaccgtcgaatcccttttctcacaccatacatacattttgttaccaaattccatcggttctatcttcagggtggatccagaatctgactgtttcttaccacattccatctttgctaccctggtcccactcagcctgcatcatctctcacctggattactgcaagtttcctatctggtctctttgcttctgtccttgtcctcctacactctaattttaatgcagctaccagagtgaccttttagaatgtaagtcagagcaggtcacttttctcaaaaccctgcagtagcatccactgcactccaagtgaaagtggcatttccttctggttggcatataaggcccaagatcttctcttctcttgtccctctaatgctgggcatgcttccatctcagggcttttgtgcctgaaaccctcttcccccagatgtctgcatggtcccctgtattcttgccatcttcttcatgaaggccctcttgaccactgttcttgggagtctccaggacagtttcagtgattcactagaaggactcataaaactcagaaaagttgttatagttttggtttcttacagtgaaaggacacagattaaaatgagcaaagaaaaaaggtgcatcgggcagagtctgggagagaccaggcatgagcctccacctgtcttctcccagtggagtttgtggacagtgcataattcccccagcaataatgtatgacaacacgctggagcatcgccagccagggaagctcacccaagccttgatgtccagggtttatattgggggttagtcatatcgacatgactgcctgtttgtgtggctgaccttagctccagatcctctagaggtcaaattgatacaacatgtccctaggtccccaccataagtcacattgttatagattatctggcatggctcaagccccagagagacaaagacactgttacttagcaagatattccaagagcatagaggttatctcccagaagccaggcaagggccaaaagtttcactgtagtgtgcagggtttggacagtccaagcctgctgggttgtacaaccacccaacataaaattgcaactctcctctgacattctctatcctgttactctgctttattttcttctatggcatttattcccatctgtcaggcgtaatgttttacttattcatttgtttctgtctgcctcccctctagaatgtgaactccctgaggaaagaattgttcaaatattttgctcctagaacaatacctggtacacaatcagatttaatgaatatttgctgaataaataaatgaactatgggcattaaatatttactgaatgaataaatatgtgttacaggctgagaaaatgggggttgtgaccaactcagtttaccactcgaggctatatgagcaaacagaaaactgttctcatgaaagcaggatgttggaaaactgacaactgcatctgccaccagaaaaggtgctgagggcagtcacgcctcaagcacagtgttccttgtgattatccgaaagaacatctgaagcctgttgtacaaagaaaacaattatatgtacctgtgattaatcaagcagctgatcaaccgttacctctccctccctgctctttctacctaatataaatgaagggctgtagaagctcaaggctgcctttgctcaccagaagcaaggagctccctgacacattctttcaaaacagatctcttgtctttatttctgcattcgtcccccttcattcacttccgtaggaaccgtcagtgacaaatatggatattgttgaaggtgtggagagggaagaaacctaattttttttttttttgagatggagtctctctctgtcacccaggctggagtgcagtggcacgatctcggctcactgcaacctcagcctcccgggttcaagcaattctcctgcctcagcctcctgagtagctgggactacaggcacccaccaccacacccggctaatttttttgtatttttagtagagacggggtttcaccgtgttagccaggatggtctcggtctcctgacctcatgatctgcccgccttggcctcccaaagtgctgggattacaggcgtgagccaccgcacctggtcgaacccttctttgttagacaaaaacttgccagtattcggtgaaattgattaagaataggcctttaggccccttggtcccactcctgtgtgaatggtcaagaggagtcttgtatagatacataagtggcacgctcaaagtgaagggaacctaggtgtccatcactgaaggactgggttactaaacatggtggatgtgtactatgcagcggcgcttctcaaatcctaacatgcactgagtgccctggcaatcttgttatatataacgcagattccgattcagttggtctgggtgagatctaagactccagttctaataagtgattcagaattgctattttctgcaccacgctatgtgaagcaagggcaaaaaccagagtagtgctgttcaatgggacttccagtgatgagatgcaaataattctatctataatatatccgtgctgtcaatatggcagccgctagccacgtacggttattgaaatgttgtgagtatgactaaggaatggaattttaaggtgcatctaattttaattaattttaatcaaaaattaaatggccacaccagttgtggctaacggctaccatattggacaacatatgtctagaagactctggggcagttagaagcagtgaactagatgagcaaatagtgatgcagatagattgttacaagatgatttgacgaaatcagatgacgtatttaataatacaacctgacccctcacctacacctaccttccttcacacactatttaattgaatgtaaaatactgttgattatattgcactttattttgtagaccactcagaaagaaaaagaagttgccaattaaattatgaggtgtaagacatcatgctgaattaagatgtaagatgcttcctaatttcagagatgtgaaaaatatgaaaagaatgtgtctttaaatcaataaaatataatgttcaaccaccatagctggaactttgagttgcaaataaaattaaagtagtctttaaactatttttatttagctttatagaaggatgcaggttgagaattatagcatgagttatatcatgtcactgggtgcccaaatctacccaagtacacaacttcttttctctcctttttcctatagggcttgtatggctgctaagtattaaatccacagtgtgtgtttatcaccttgacacagaaggtgcaacctccacaaactgagacaaggacactataagaaaagaaaattataggccagtatctctgatgcatatagatgcaaaaatcctcaacaaaacactagcaaactaaattcagtagcatattaaaaacatcatacaccatgatcaagtgggatttatccctgggatataaggacggttcaacatgcacaaatcactaagcatgatatacctcaacagaatgaaggataaaaattatatgatcatcttaataggtacagaaaaatcattttgcaaaatacaatatcgtttcacgataaagacagtcaacaaattaggtatagagagaatgtacctcacacaatagaggccatatatgacaagtccacagctaacatcatacccaatggtgaaaacttgaaagcttttcctctaagatcaggaaaaagacaaggatgcccactctagccatttctattcaacattagcactagaagtcctagccatagtaattaggcatgaaaaagaataaaagacattcagatcagaaagaaagaagtaaaattgtctctgtttgcagatgacataatcttatatgtagaaaaccctgaagagtccaccgaaaaactgttagaactaataaatgattcagtaaagttgtaagatacaaaatttggttgtgtttctacaccctaacaatgaattatcagaaaaaaattgagaaagcaactcaatttacaatggcatcagaaacaataaaatgcttaaaaataaacttaagcaaggaagtaaataatctgtacactgaaaactataaaatgctgataaaaaaaattgaagacaacataaagaaattgaaagatatcccatatttgtgaattggaagaattaatatttctaaaatgtcaatgctaaccaaagctatctacattttcattttaatccctatcaaaattccaatggctttttctcacagaagtagaaaaaaaatcataaatatggaaccatgaaagaccctgcaatcttgggcaagaagaacaaagctagagacatcttattgtctgatttcaaaacataatacaaagttatagtaaccaaaacagcatggtactggcacaaaaacaggcatataaccaatgggacagaatagagagctcagaaataaatccatgcatttactgccaactgatctttaacccaaaggaaaaggatattctctttaacaaaagctgttggaaaaactggatacctgcaaggagaagaatgaaattggactcctatctcatgccatgtacaaaaatcaactcaaaatgggttaaggatttaaacataagacctgaaactgtaaaatgacaagaagaagacatggggaaaaaacttcttgacatttgtctgggcaatgatattttagatataacccccaaagcacagacaacaaaagtaaaaataaacaaatgcgattgcatcaaatggaaaagcttctgtgcaccaaaggaaacaaccaacagataatgatcaacagagtgaaaagacagcctaccaaatgggagaaaatatttgcaaatgatgtatctgatagagggtcaatatccaagatatataagcaatgcaaaaatcaacagcaagaaaacaaataacccaattaaaaaatggacaaagggccgggcgcagcggctcatgcctgaaatcccagcaatttgggaggctgaggtgggtggatcacctgaggtcaggagttcgagacctgcctggccaacatgatgataccctgtctctactaaaaatacaaaaattagctgggcatggtggcagatgcctgtaatcccagctgcttgggaggctgaggcaggagaatcacttgaacccaggaggtggaggttgcagtgagctgagatcgcaccactgcactccagcctgggcaacagggagagactctgtctctgaaaaataaaaaagggcaaaggccctgaatagacatttctccaaagaagacatacaaaggaccaacaagtatgtgaaaaggtgctcactatcactaatcatcagggagacacaaattaaaatcacagtaagacatcacctcacacattttggaatgactagtatagaaaaggcaaacaataacaaatgctggcaaggatgtggggaaaaaaagtgaatccttgtaccctgttggttggagtgtaagttggtgcaaggaaatgaaattggcatctcaaagtgatatctgcacacccatgttcatggcggcatcattcatgatgaccaggatatgaaaacaacctatgtgtctgttgatggatgaatggataaaggaaatgtaatatattagtatcagtataatttaatattattctgccttataaaagaaagaaatcctgtcatttgtgacaacatggatggaccgggaggacactgtgttaagtgaaataggtcagacacagaatgacaattactgcatgatctcacttacatgtgaaatctaaaaaactcagactcttagaagcagagagtagaatggtggttaccagacactggaggatggggtgggaggatgaggaaaaggagggagcctctacttcccagcaatctttcgtgcatgtcccagacctgccaccttagggttccccaatactgtgctgtccccatagaacataaggtgagtacaacattctattttagctatactctgcagtatccaagcacagaactttgagaagacagacactaagatcatgaggtcattcccaggcagacccatccaagggtgcctggtaaaggtttagcaatgactgtccggcaaagccctatctatagtgtttttcaatttcagtgcagtaaatacttcttctttggctattgtcaagctactggtgcagacagagttggggagttggaaagaggtgtgcagaaactcatcattacagacgtagtacaagagacatatctcactcccaagcataggtattagttgaaataattagcaacagttgagttttgagtatttactgacaatttttttaatcaattatgtaattatacgcttatgtaatttaatttttaatgatggctgcatttagcaactggttctcgaaattcctgaaaatttgctggtagactcttgcgagcatgtatgagctggccctggcacacattgggcctgccgcccagcccaagtttattgacctcgttactcatagggactctgctttattttaaaattatgtttatggcttcttgtctgtcatctcctgctagaatataagttctgtgagggcagggattctgactggcttgctcacagttcttcctccagcacccagaacaatgcctggtgtatagcaggtgcctaataaatagaccaatgcctggcccgtagtaggtgctcaatagctgttgatgagtgaaagtaagaaagagaatgagattcctaacacaatggtttcatgtaaattagaaacagtacactgtgacactgccttgttttccaaggatgcagggcactcaaagccatttatgtcggtgcctgtggggagggaggggagcagagccagagatgaagagtggaaataaattaataaaatgagagaagggctttgcctgggcaggaactgaagcctgtgattaactcaactctcctcacctgagatctgattaggaaaatgaggacatcttcatttgcatagaattttccaggaaacaaggcacttagttccctaccctggaccacaggggctccagggaggaggctggtagaaggcagtcatgctcaaggtcactctgcagggctgaggtgtttccgtctagaaacctgatacagtggggtggacgggggactcccaaggaaaaacacgcaaagagggaggcagccacttgtcagtacacagctcctggcttggcatggtggggccactgtgtacatgtttcttgaagtcattaattggatggataaggctgggcgcggcagctcacgcctgcaatcccggcactttgggaaaccgacgtaggcggattgcttggggtcaggtgttcgagaccagcctgagcaacacagggaaacctcatctctacacaaaatttaaaaagtagcggggcatggtgacgggcacctgtggtcccagctactcgggaggctgaggtaagaggatcactggagcccaggaggtcacggttgcagtgagctatgattgcgttacagcatttcaccaggagactgagcaagaccttgtctcaaaaaataaaaagtaaacacatggatgaatgaatacaatttaggatgattccatttttattgtcattatttattcggtttttagagacactaagcgtgttaaaaattgtcgtctttggaatacaatgccggtttaaggggtctgtgctcctgccctctgtgcctccggtcttgagtagtgatggtgacacagcaagggtgggggcttggtggggagaaaacgcctgaagcaactgctctgggaaaggagagatcagagccggagtaaagatcaggatgctggggactggggctcctgggtctgagggaggaggggctgggcctggactcctgggtctcaaggaggaggggctgggggactggggctcctgggtctgagggaggaggggctgggcctggattcctgggtctgagggaggaggggctgggggcctggactcctgggtctgagggaggagggactggggcctggactcctgggtctgagggaggaggggctgggggcctggactcccgggtctgagggaggaggggctggggcctggactcctgggtctgagggaggaggggctgggggcctggactcccgggtctgagggaggaggggctgggggcctggactcctgggtctgagggaggaggggctggggcctggactcctgggtcctgagtagagagaggagggcctgggcagctgacgaggtccatcccaccgtgaagaccatcatttgtcccgcatcgtttcctcaatccagcttctgtacttgcacaggttggtgtagacaccggggtagccaggcagggcgcagcgctccattccccaagacacgaggccctggagctgtcctctgcacaccaggggtcccccagagtcaccctgagggggaggaacagaaatggagacactgatggacaggtagccagagccaccatggcacagagaacccgagaagcagacacagggagacaggcagagacactggtggacagttagggacacagtcctgccccagctctgaggtctcagccccggaggtcggggcacttccttccctctccgctgggtctggctctgtctctgtgtgcacctgcctgtcccttgaatctcaccaggcccctctctgttcgctccaactgtagaacatttgtgtgtctctctttttctatttccccatctctgcctccctcaaggatgcattaagatttctagaagcctcagcacagcctttcccagacccatatgagcagaggccactctgcgatctttccccaacctgcctcatcccattccaccaactaccctaagagggttactcccacctgacagatgaggaaactgaggcatgaatgctctgagtccattacccagggggcacagggctaggaagcagggtggcctggctatcggaatctctctgtgcctgcggttcactctcttctgaagacctctgcagacttccatgctcctgacatcatttgcttaaatcccagtcccaaataatccctaccacagctcccatcctgggccttacctgacaagagtccttcccgccctggggaactcctgcacagaccatgccaggcgtgatggttctaggataggccttctggcacacctcatccggggagatgttgatgttcacgcattgcagagaggcggggtacctggctgggggacactgcagggttataactgggtctaccctcccataagacccaagggtccaggcccccagcccctcctccttccgacccaggagtccagccccagcacctcctccctcagacccaggagtccaggcccccagcccctcctccctcagacccaggagtccagacccccagtccctcctccctcagacccgggagtccaggtccccagcccctcctccctcagacccagaagtccaggcccagcccctcctccttgagacccaggagtccaggctccagcccctcctccctcagacgtatgagtccaggcccagctcctcctccttgagacccaggagtccaggcctcagccccctcctccctcagacccaggagtccaggcccagcccctcctccctcagacccaggagccccagtccccccagctccacctcctggagacccaggagcccaggcccagtcccctgctttccaagacgcaggagtcctcaccgatggggctggatatagttccccagcctgacactcggcaggaggtcccggggctggcacaggcctgggtgacctcaatgggcctgactgccctcccgatccgtgcgggctgctgtagctgcagcagcatgaggtcgttgtcgtgggtccgggagttgtagttggggtgcgtcacctgacgaaccacgcgcagcacctgctgggtggcctcccacctcctcaggttgtgcttgcccagggcaacctgaaggatcctggccacgacccccaagagaagcgctgctcagggtctgagccagagactcctccccaccctccagcccggttccctggccgggtgacgagtcttccccgaggtctagcctgcttctcactaactgcaggccgagcattcttggcctcctgtgcccttccccatggccagggcattctctcggcccagccccagctgcctctccttccgctcttgggctgggctccagctcctggcttgggaagaaggtgatgattgggagagcttggctccgtgccagggtctgtgctgggctcggtgcattgagtcctaagcgaaactgcgttatgagtctaggctctaaatcggaactgatattccggagtaggcaccattctgtttctagcctgggttctgagttctagacatcttaaacttttgactctatgctaagatcaggattctagatcgaacctggattatgacttgatttatttatttattttttttttgtgatggagtctcgctctgtcacctaggctggagtgcagtggcacgatctcagctcactctcgacctccaactcccagttcaagtgattctcccgcctcagcctcccaaagtgctgggattacaggcgtgagccaccgcacccagcctctacaggtctgtttcatattggattatagggctcttggttctggactctggccctagcccttgacctcaggttgggctctgggttctagttggagctctaggttatggcccggatccaagattctagagtctggtttgcattctggcctttatattctagactctggcctgagctttgatctctaggttctagactgacctgtttatggcatagatatggcttataggcattttgacctcttggctggggtctgggttgtaagttcagatctagaatttaggaggggtctaggttttatatggggcttctgattaggatctgcattctgggatttattgattgattgattgatatggagtttcgctcttgttgcctagcctggagtgcaatggtgcgatcttgactcactgcaacctccgcctcccaggttcaagtgattctcctgcctcagcctcccgagtggctgggattacaggcatgtgccaccatgcctggctaattttgcatttttagtagagacagggtttctctatgttgctcaggctggtctcgaactcctgacctcaggtgatctgcctgcctcagcatcccaaagtgctaggattataggcatgagccaccgcacccgccacattctgggattcaaacactgggttgaagtctgctcatagcggagctatagactagactctgaactaaaccttgggtgtgaaacagcctccaggttttgcctctattcttagagttgtatgttccagctgtgagcagcgttctagttctggatttatggctagactgcaggtcctgaactgggctctgagttctacgtagtgtcctgagtttctgaatgtagacggggtcctgaattcagccaccaatctggaatgggctaagcttggtctcgatgtaatgtgtggcctctggaagaatcactggatcagatgttcggttctcagcaggtccatgggttccaagctgcccatctgctttcagaacctatgctgagttcgagatttatggaggagcccacatcccgagctgtgtttttgttccaggctcttctctagacctcaaaccaggagccagccactacattgggttctatacagagatccaggttctcagctcagctctagggctttagactctggaattcactaggtacagggacaggggagggggtcacttacgggcggccgcagtgagcagcagtgatgacccactggcctgaaagcagggcgcctccgcagaggaagcggcgcctgggacccgccagcagggccgcctgccacggctgggagctccgggtgcacgtatggccaccaattatcttgttctcatcctcttggctctgtgtcatggctaggagtggacaggattgggtggggaaagtagatgagcaaacactctccactccacaagtttgtaggattccaaaactgacaaatccccttccttttggtctaacccctaaactgcccgcctctatctgtcccacccagggtgagacatgcccaatattgaccccgttattgccccagcacggagagctttctgactcacctcccaagtcacctccgtagcatctcttattttgtgccgtggccaccttatccagggccttgctacatctacgacccttagctctatgctcccataatttctgtgatcacttctcgaaatatgccacatttccccccaatgagtccttccccaacacattcaaggacctccctgtctcctccccaacgttcccactcagtgggaccccaaggatccgccatctcttgccccacacttgcccccatccacctcacacacccatgccacgatcccgccaccccatgccacgatcccgccatcccatcatccttctccaccttccctctgacaacaaaacatctttctgacattgtttctttcctaacacagtcaggtagagccccgtgatctttctgctatgacccactcaggacctaatagttccctaagattccttatgtattttgcaccagaccttataaacacctctctccccggccccacaattccctagcacctccacaactaggaatttaggcctccagcacgttcccccaccatgacccccaaaccactccctgctctttcttatgaggtcaccatgagcatccaggggccccaaggacccatccccatctcttctcagagtctccaggggacccccttgtgtcatacccaaccgttctcttacctatagccaggacttgaagtgctgtcagcaggaggaacattttaggggctgagggccaggtcctgtcaaatgcagagaaaaagtgagagagaaggaaccttcaacagaaccgggggctgagaggcagagacagcaaggggcacttacccagagcccaagaccctcagggacatgaagacacagcagagaggtagggaccagagacgaggggggcggggcctgcaggctctgcgggcggcaggtgggaggatgtggagcagggcacaggtccctccttgatgtcttgatgaaggaaggaggggaggtgtctctcttcctagtcacactggcaaagccttttatccctggtaaggacagctggccctgcccccacctcccgccgccctgcttctgacatttttttttttttattgcctagttcccattccaggactccctgatcccatcccctccctcccctgtctggccaaaaaagcagccacaattgttcatgagaacccgcccagggaagatgctataatctagaaggaatcctgggaggggaccccagggcagggtgggcaggggagggttcccagttgctggaggtggtggatctagtggtggagtcaggaaaccagggtggggagtgtcagaggaaagggcacgaaggggctgagagagggaggaagagatggactgagagagggagtcacgggaggagggagagagggagagagagagagagagagagagagacagagagagatggagagagagaaagacagagagacacacagacagagagagacagagacagggtgacgggggggagagagagagagagatggagagagagacagagagagagccagacagagagacacagagagagagagagaaagagagagacagagacagagtgacagagagggggagagcaagagacagagagagactgggaaaatgaatgagaagatatgacagtggagagagaggagtccaggaatacgagcacagaggcaggtgtgctcatgagagaaggaactgaggagagagctggagaaaccggtggaagttggatgtgacagggaacagaagaggcagacggtgggaaaaaaacaagacagaggaagagggagacacagagacgcagggagagaggggtgtggagaagtggagatagaaaagcaaaagacggagggaagaaggtggagatagaatggaaacagacacacagaaagagaaaacagtggagagagaggagagaggccgagacgcccccaccatgcggcactcaccacaaacacacacagaacaacagcgatgatgatgaaggcagtgcgggcatgagacgtggaagagaacgggacatggtgggagaaagaggatgggacaggcaggccgatggcagaggggagacgggaaggatgggcacctacaggggatggggacaatgacagaggagacggaggcctagatgagagatggcagcgccagggagagatggagaggaggggtgggatagaggacgggcaggaggtgggcgggagatacctggacctggagcagagctgcccaccttgctttctcactttcgactcctgagagatgggggagcagaggccccagcagggagcaggaaggttggtgccagaactggcattccccagcttgggatctgctaggtgcagagacaaagtgagagctggagatgcaaagagagagtgacagagacccagagagggggacagagacccagagggagagggagagagacccagaaagagaaggggacagagattcagagacagaaggacagtcttaacagacggggttggaaattcaaaataggagacggcagagagcaggagagacagagtgaatgagatggggaaggattctggccagcctgcaggggggttctggagttgggggggttccatcctcatttgggggagggcctaccctcctcagcccctcccctagccccttaaattccccagtgcttgtgtccgtctctgggcctgggcagccccgtacctggaccacgtggtgactcaggaggctgcttgcctcccttggctaccccaactgttccccggcctcagcctgactcagcctccctccacctcggcacccccctaggctggctctttgagctggagcttggcctgggtctgtctgtacacctggggacgcactgtctgggcacctgcatctggagccacacacccatctctccccaggtgcctttctgtgattcctgaactgtttctgtttaactatgggcctccctgctttgagctgaaggccttgggaagccttcccggcctcctctgccttggttcaggctcggcatcaacacaagaaccccctctttatttttaaatttttaaatttattttatttatttatttattttatttttttttctttttttctttttcttttttttttttttgagacagagtctcactctttagccccggctggagtgcagtggctcaatctcggctcactgcaacctctgcctcctgggttcaagcgattctcctgcctcagcctcctgagtagctggggctataggcacccaccaccatgccccgctcatttttttgtatttttagtaaagacagggtttcaccatgttggccagtctggtctcaaactcctgacctcaaatgatccaccctccttggcctcccaaagtgcaaggattacaggcatgagccaccacacccgtcaagaactccctcttttaagaaagggttctcttgggacccagggatggggtggcaggagggagctgctctgtggtgacgaatcagctttgcactggatgtggcggtgattacacgattctacacatgagataaagagacacagaagcccacgtgcacacacacacgtgcaaagaaatgcgtgtgaaaaatgaacgcgcagtgtgatctgtagtctcattaatagtttggtttctgtgttgatttcctggtttccattctgaacgacagttacacaaggtgtcgccacggggagaagtaggtgagggagattccctatgctgtgtgtgtagcctcctgtgagtctgtaattatctcaaaggaaaaagttaaaaataaaacagaatttcctagtaaacacaaggtctccctgttcctaaaaagaacaccctacttaagcagaaggccttggtcaacccccaggagcctgggagtggctccttcatgccactctatccctgagatccaagagaatcctttctttaaagggtggcaggggggcaggtgctgtggctcacgcctgtaatcccagcactttgggaggccaaggtggatcacctgaggttaggagttcaagaccagcctggaaaacatggtgaaacccaatctctactaaaaatacaaaaaaactgagctgggcatggtggtgggtgcctgtagccccagctactcaggaggctgaggcaggagaatcgcttgaacccgggaggcagaggttgcagtgagctgagattgtgccactgcactccagcctgggtgacagagcgagactctgttgcaaaataaataaataaacaaacaaataaataaagagggggttcttgtgtttatgcagagcctgagccagggcacagaatgactggaaggctccccaaggccttcagctcaaaggtagggagacagctggagatgcagctgatgaggcccagttcaccgccggtggctcccaaggacttgccgtccccagcccggacctcagcacctgccgtgccgtggccaggttgctgggccctcttcccaccacatgctaggttcccagggtatctcgctcaccactccaccacctgcttggcacggtcttgtttgctgtgccacgggcatcgataaacatctgatgaatgaatgaacacagagcctcagtcgctgctcctctgtgaactcacggtctggtgaaacaggccagcggggcaacaggaaactccatctggtgtcacgtgtgctcccctggaggaggctgaggggctggatggagcctcaggtgtgggaaagggttccaggaggaggggcagtcttagcaggttcctgcagatgaataggagtttgccagggaggatggacagtgtgtggagagggtaggagggaggtgagtggtttcgagtagggatggtggggcaggaggatggtgagagagctcagagcgtaggagagaggagtggccaagatgagcagggccctggtgctgcaggggcgagaattttactccgagggtgatgggggatggtggcatgatcctgagtaggggagagcagaatccttcgggatactcaggtctggagctcaggagagtgatggggcatcacggcacggatggtgctggataccagcggtgtggagcccacctagggagagggtatacagtgagaggaccccactgaagactcacagctcagggggtaagaaacagttatgccaggggtaggagtgattgaagagctaagagggacaccaggagggagcagtgtcaggaaagttgagagcttttttttttctttttaaacagggtgtcactctgttgcccaggctggagtgcagtggtgcaatcacagctcactgcagccttgaactcctgggctcaaccatcctcccacctcagcctcctgagtagctgggactacaggcacgtgctaccacagtcagttaatttttgtatttttttgtagagacagggtctcacgatgtagcccaggttggtctccaactccagggctgaagtgatttgcctgccttggcctccccaagtgctgggattacaggtgtgagccactgcgcccagccagagagcattttttaaacgagggagtggcaggggcggtcagatgcctctggaaggaagataggtgatgggtgattttggagagaaaggttttttgtggtgtggtaggggtggaagctgggcggagcagaggagaccataggtgcggacagctcttgggtgtgaggggaggagaagggtggttgatactgatggctgtttataagaaaggaaaacctggatggcacttggaacaaaaacaatcactcacatgtattctgtgctcagcacagccagggactgtgatgaaaccttggttgtttttttttttttttgagatgagtctcagtctgtcacccaggctggagtgcagtggcaggatctcggctcactgcaacttccgcctcccaggttaaagcaattctgttgcctcagccttttgagtagctgggactatgggtgcccaccaccatgcctggctaatttttgcatttttagcagagacggggtttcgccatgttggccaggctgctctcaaactcctgacctcaggtgatccacccgcctcggcctcccaaagtgctgggattacaggcgtgagccactgcgcccggcagatgagaccttttaaaaaatatttaaattttaagaaaattttacaattttttattgttgtaaaataaacacagcataggccaggcgcagtggctcacgcctgtaatcctagcactttgggaagccgaggcgggcagattgcctgagctcaggagtttgagaccagcctgggcaacacggtgaaaccctgtctttactaaaatacaaaagaaattagctgggcgtggtggcgcacgctgtcgtcccagctacttgggaggctgttgcaggagaatcacttgaaaccaggaggcagaggttgcagtgagccgagattatgccactgcactccagcctgggcgagagagtgagactccatctaaaaaaaaaaaaagcacaaaatcaagcattttaaacatttttaggtacaattcagtgggattcagcagattcgcattgctgtgtagccatcactactctctaactcccccagatgttttcattgtcctcaaattctgcacccactaaatgataactccctgcttctcccttccccagcccctagcaacaatcattcgactttctgtctctatgaatttgactactctaggtccaggtacctgacataataggaattggattttttttttttttttttaagagataagtcttactctatcacccaggctggagtgcagttggtgcagtcatagctcactgcagccacaacctcctgggctcaagcgatcctcccacctcagcctcctgagtagctgggactacagatgcacaccactacacccagataattaaaaaaatattttgtagagatggggtctcactgtgctgcccaggcttgtcttgaactcctgggcccaagtgattctcctcccacctcagcctctcaaagtgctgggattacaggcgtgagccactgcacctggccaaaaggaatcatatgatatttgtcctcttgtgactggcttatttcactcaacctaatgttctcaacactcatccacgttgcagcatgtgccaggatttctttccttttttaaggctgattgctattccactgtgtatatagaccacattctgtttaaccagccaagttctttatctgggttagtgtcttccctttcttttcctccctctttcccttcatctctccctcttctcccatctgccttccttttctcccccacctcttttcagcaaatatttatcaagcacctactatgtacaccctcatagttctaggggatacagcaatgaacacaatagataccccttccaaaaaaatctttgccctactgatctgtatattctggaagaaaaagaaaggaaataaatacgatatacgacattacaagttatgagggtctatgaaaaggtggcagcaagggcttccctgcagtggaaggggtctgtaggtttgggaactgcaagatggtcagtggggggccaagtgggtgaggggagaatagacagtgaggatagtgaggtcatggaaagtctggactcctcgggagaggcactaacttgtccccattttacagacagggaaactgaggctgagagaggaggtggcttgtccaaggtcccacagctggtaggtgcaggaggtatcagagactccaggactgtccgaacctccgctccacactgtaaactcttccttctgttgtctcccaaggccactaacaagttcatttgcacaccgatgtgtgtgtccaacacgatttgaacacatttcacgagaattaacttgctgacaccttcccgtagccatgggagagctcatgagtacctccggtattgttactcccctcattgtacagatggaggaagccaagatggagatgctcggccacgtgccaaggttacacaacgctgaacgggggcgccgtgatttgaacgcaggtggagagctctcaaccacctcacgaaatgttcaagaacaaaggagtggatggtgcaaccagcgatgtggtgggattagccccagacatggggaaagactcctcttacattgtttcgggaaggaagaaggaaagggcaggtcaggtgcgggtagggtgtgagcccgatggcaggaagtcgaggctggtccgtcctgtggcttgtttcttccagggagacgtcagtcggctcatctcaaggggccttggtgggtggggttgggaaggctgagggtggtggtgaaggggcccaggtgacgctgaggatcacatgttttaaggggcaccctctcagcagttggcggattttttttttcctccaacttcctggatgtagacaaagagaaggcgcctgcaggactgggtgatggtgggagggatgctgggactggggagctgagggtcgccagggcagaggggactctggggttgcccttgaactcctgggctcaagtgatcctcctcccgcctcagcctctcaaagtgctgggattacaggtgtgagccagtgcacccggccaaaaggaatcatattatatttgtcctcttgtgaccggcttatttcactcaacctaaagttctcagggggtggagacaaggggtgttggtggggaggctgcctgaggagggtcagacgtctttgaggtggaagaacaggaatggcgcagacaaccatgcacagaggcaggggaagctgtggtcagggagtgggaatgtgggattttgtggtttcagaggtggagctcttccagatagagatagaggctgggtgtgactgtgggaacgacggcgggggaggtggtctctggccacgtggaggtagtgggatgcagaagctggggtgtcctatctttggaagctggggggtcctctctcctgaagctccccactccatgtgtcagccagtacccgtctctctgtccacttatcatagcaatggggcaggtcaccaagggcttcacatacatcctctcacatttaaccctcgtgaaagccctgtggggtgagggactcttattactaccacgttatagatgaggaaaccaggccttagacaagtaacttgggcaagtggcacagccaggcctcgaacccagatcatttggctgttaaacaccatgtcaccctgtctgcaaatctgtttccatgtcagcgagggtggggagttctgtttgccttgttccccgatgggtccccagctcctagaacagcctggcatgagtgtgcacacagtgaattgtcgtgggatgagcagacagacccccgtctctgtcttcccttgggtcctgataggctcttggttggcaactttcctagtgtctaccgtgtgccatgtctcccttaattctcccaccagccccatgagacacgatgacactcattttacagatgacgaaatggagagaaatgaggtcagttgtctaacgtggcatggaagggctgggatttgaacccgagccagcctgacttgatgcctctctgcttctgatctcatgtgtgtcattgatgatccaaactctctccgggtaatctctcagacctttccgagccagcactgaaaactgctttgtgccaggcggcctctgtgtgcaaacctgggggcccctgatgctcggctgatggacagtgaacatccctgccccccatcccacctctattacctcccatttatttctttttttttttttttttcttttgagacggagtctcgctctgtcacccagcctggagtgcagtggcacgatctccactcactgcaagctccgcctcccgggttcacgccattctcctgcctcagccccccgactagctgggactacaggcgcccgccaccacgcccggctaatttttttgtatttttagtagagacggggtttcaccgtgttagccaggatggtctcgatctcctgacctcgtgatccgcccgcctcggcctcccaaagtgctgggattacaggcgtgagccaccgtgcccggcccctcccatttatttctgtttaagctccacggtgtaccccaaccttccccctgtgtctcctctaagttagtatcctctccccaggtgcttgggtcaaagacgcttgggagcgtctctgattcctccctcgctctcacctcccattttggcagttcctgtcacttagctccaaagtacacagtaaagaatccacccacttgtctcctctcagtcgccctcttccaagtcacccttatctcccacctacacaggtgcaagagcatccaaactggtctcgctgcttccagcctcgacccccaacccctccctccctcgccctgctaagtccattctctactcagcagccaacgtcttcttaaaacaatatcatgttaaaacctgcttaaaacccatctgtgagtgcccactgcaattataataaaacgcaaatgcctccaaggcacttggtgtctggcttctgtccatccttccaacctcatcactgcattgtgtactgtgcctctgccccctggaacttcttccatcttctcaacattgggaggcgccttcccaacttagaggcttggcctttgctgttccctctgcctgggacatgcttcccaccactctgcctgtgatcttccttcagatttcagcttaaaggtcatctcctgaccaccttctccagagctggcattcccttccagtttccatctcagcttcttgtgggtttccttcctacaccttatctcaatctgtaattgctctatcggtttgcttccttgtttattattattgctggttttcttcctctctatggtgtttattactgtcggatgtctctcatgttttatttatttactttcttactcttacgtctactctgtctcccacgacttgaatggcaaccctgacagtgcagggattttcactgtctttatctgcctctatgccctggcacataggaggtgttcagtaaacctttgtggaaggaagaggcatctcttattagaactgaggcttcacgagggcagggaccttgtctatcttgttgctgaatccctgttgccacgtctgccacccggcacgtggcaggggctctataacaggctgaaggaggaagatcatctcagagcctgtttagaatctctgcttttctccagaatctctgcactcaatgtctccacctcctcagacctgacagcgatctccaatgacccagccccaggagagcacacaggtggaagatggggaagccggtctttctgagactgggctccaaatccctgcagtggggagaatgcttctgacctgatgggatgagacgctggcgtttcgccccactgccacctttagttgtgtttatgtagaggctgtgtttgccaaggccacaggccacagcaaaagtccctttgtccccatgaagactggggcctcctgtttagctaaaggagcgtctgtgttcacttgggcctccagcctcagcagctccctgcccctgccctccatatttaccaagccttcctcctccagcaaaagaatttcccgggtttaccatggccaccggcatatgtggcgaacatcttttttgtttgtttttgttcagtctgcctggaagaaatgtctcttggatttacactgcctttgagaacacgtagggctcttcgcccttaggaaacacaccctcagcattgaatagggttcccagctcttggtgaggacttcttaaatggccctcacatccattctcaccatcctgacaccctcgccactgccccagttttggctaccaaatccattcccagacctttgtcccagccctctccctggcctcctggctgagtcttccctactccagtccttcctggacacggccccagagggatctttctgacacccagagccggccctgtctgctctcgccctccctaagtgccccatcccggccagaagaattccagtgctttatggagggctggccaccccctccaccatcctgcacagggaggagcggcaaagcctcgcagggacttggggctcccatgcctgcaggcctctgtgcctgccattctctctgccttgcacatttgtccccatctcgccctttcctgtgctcattcttactcatctccagctcccggtttacacattacctctttcaggaagcgttccatgacgcaccgcactgagttagaagccccacctcaggcctcccctgtgtccctcctaagccccacggtggcacatatccctccggatcttgacttgccagtatccctgcccgcctccgctggcagacagggagcccattgagggcagggactggggctgactcagctgcattgccccaccgccctgcgcagggcccgccagctccaaggaggcgtcaggaaatgtttgctgcatgaataaaggggtgatcagtatccctcctttactcaaatatcctccatggcttctgcagtgcttagaaacaaagccaagccaaagtcgcttctccctctcacctctctcctccacctgccccctctcctttttccctcaatctcagagtctgcacttgctgtttcctgccaggaacactttcccagagaccctccacccctgtgctctctgcctcaccctgcacctttccctgaatatctcctccttgaagcctccccgtccctcctacttaaatagaagcgattatcacgatccaacataccatatatttgacttatttttctcgtttttttttttttttttttgtatctcccttgagggcatggttttgttctgttcactgctgtcacaaatcacctgctcaaaaagtatttgttgagtggatgacacaggggtcttgaggtcaaggagtgtctggtgtttatacggggccttaagatctctgccaacctgtgtctctcacccttaaggactggctcagagaccagcgggcaggtgggcagagacagctgagctcccagtcggggctggggagggggagacctggctttgatgtcaatgaccaccggatgcacaggcgaggtcacagcgaccccttgtggccagagacgaaaagagcacctcccccccgccccgcttttttttttttttttcttttttttttttgaaacggagcctggctctgtcgcccaggctggagtgcagtggccagatctcgagatcttggctcactgcaacctctgcctccagggttcaagcctcagcctcctgggtagctgggattacaggcacctgccaccccgcctggctaatttttgtatttttcgtagaggcagggttccatctcaaattcctgatctcaagtgatctgcctgcctcagcctcccaaagtgctgggatttcaggcgtgagccaccacacctagcacccccagctcttcagagacccccatgaggaaggccgcaagcccaggctaagagggacggcgagcactcactaaatgccaggcgctcttctaagcactgatatgtatttttaacaataaccacaggacggaagtaccattcctccccacactgtacagccaaagaacctgctcaaggtcacacagcattcccggcagagcttggttctgaactcaggcagtctgggtctaggaagcacattgcaaacctgcgcggtccagtggagtgcccacaggtcccatgtggcagccgaactgtggggagtctggattgagatgggccgaaagtgtaacatacacaccgaattttgaaaactctatatgaaaaaacatgtataaaacatctcgcttaagttttaacaaactgattacatattaaaattataatattttgtataagtgggtcaaataaatttattaaaatatcacttgtgtcccttctctaaaaatacggctatgaaaatattctaaattatacatacggtttgcattttcgattggagagtgccttaaaccacaaaagaaatctaatccactgcccaccccaccccatgcacagggacaaactccaatgaacagaagggaaaaggtcccttacccaaagccacacagtaaatcactggcacgtcagcaataggaacctaggtcccctggcttccagcaggtagcccagcaaaagtgtccagagctccagctcctttgctgatttgctgcagtgtggccctgggcaacttacttcacctctctgggctgtaatttcatcctttatgaaattggtgctgaaggaaccaacccaaatgcccatcaatcaacgagtggataaagaaactgtggtgtatacgtatacgatggactactactcggccataaaaaggaatgaattaacagcatttgcaatgacctggatgagattggagactattattttaagtgaaataactcaggaatggaaaaccgaacatcctatgttctcactgatatgtgggagctaagctatgagggtgcaaaggcataagaatgatactatggactttggggacttggggggaagagtgggaggggaacgagggaaaagagacaacaaatacagtgcagtgtatactgctcaggtgatgggtgcaccaggatctcacaaatcaccactaaataacttattcatgtaaccaaataccacctgtaccccaacaacttatggaaaaataaaatattaaaaaataaaaaataaacttttagattcttctacataccagttaaaaaaaattggtgctgaaaacccattccttatgtcactgagctaatgaggaaggcaggcacacttggcactaggactggcacacaagcgtcatcctatacaattgatcttgatcatcttgcaccccctacagctcattctcctcacagcagctggagtaacttttagaaaatggaaattggacccactgttgggaccaaagccctccaaagacctaccatcactcttaaaatacaagtctttcttgccaacagaagaccatgcacggcccatccctgcttagtggctcgtttcatctcttgctattctcctcctcacccactctgttcccgccacactggacttgctgttccttgcacttgcaagctgattcccacccctccaggcttttgcaccagcagttccctccaccaggaaagctcttcccccaaatggctccatgctttgttcttttgcttctgtaggtctgtgcataacgtcacttcctccaaggcccttccttccctgacccctgtggaaacaagctcttcctgtctctctctctcatcattttttttttaatttgtagcattcatcactacctgacattacatattgatgtgcttgctgtccgtttctcccagactgaacttcatgagggcagagacttgtctcctgttcactgccatgttcctagaacccagaggagtgcctgatgcaaaggagatgctcatacacgttttgagtgaatcatctagtccttggcctccagcccaagtttgggtggccacacagtgaagacaggactgagaagcaggggtttgggagaatactaagccctgggttgggtgatgggaggagagaattgagaagccttctaggaggaccctggaggatctgagcagggtgatgggaagaaggggcatttctgacaagaagccagcccagcaagtcctggaggtgggactgagagcaccatctccccgggaagtttgagattctcacaacctccccgtacctgtacaggacagcaaccctgagacccggcgccccctggtggtcagacagtaacatgaacgaccaagtccaagtggtcaccatttattgagcacctcaacttctctgatcttccatttcctcccagtggtgccttgatgcgggggggatgggggggcgggggggaagggggctgattatattttcataggagaaatgggacatgaaagaggctaagtcaccgacaggctcacacaaccctgcctccagagtccaaggtttggggaacgcatccaacccctcctcacccgtgacagagataccaggagagattcgagaggggatgggtgggggaggaccaattccacgacctgtgatattcgagagctttggagggagccctcggtgtgaccccttccgactgggtgtcttagggccatttaccacttcaggctacagccagtgagaccgtggtggagacgaaatgagggtgcagtgcgtgctacacacgaagcgctggaagggaggcatcgtgacggcggctgtgaatggcgtgtgtccatcaagtcacgctccgcttaccccactgcgggcaaacaggaaacatcaggaatctgatgctcaaggagggtcaggaccatgctgagcgcacccagaaccagcagaggccctgggcaggaggtccccaaccaatccccactcgctcaagaatcacacggtgttcagccccctcctccctgagacccaggagtccacgaccccaggccctccttcctcagccacagatgcctggggtccccagtcccacttcttctaggcttagtcctggccctctcctctctcagacctaggatggtcccccagccccctcctccctcagagcctgaagcccagttcgagacccttcttccctgagacctcgaagtctggggtcccagcttcttcagggtttcaggtgaatgggcccccgtctccttcccaaccccacatggaaggccaggtaaggtaacgggtttattcacagtgtcatttacaggcagcccccaccccgcggcatcagatcccggcgggaggcccgaagtcgctagaaggtggggacggccttggaggcggggggccgggccggatccccgggcgtccccggcgtcgcctcctcgtccagaccccggcggcccttgccgatggccaggcggggccggccgcggttcaggccgtccaggagcgcgcaggcctggcagagcgcgcggctggccagcgccccacagcgggagcaggcgccggggcgcgggggccgcgcggccggggccagcgccaggcgctcggccgagtgcacgaggtccagcaccgcggacggccgcgccgcctccaggcgcttgagcaggtcccgggcgtggccgcggaaggcctcgggcgcgtagacgcactcctcggagaagtagtcgaggcggcggaagtgcgcgtacagcaccacctccttctgcgaggcgaactgcagcgggcggcagcgcggcagggcgcccccctcgccgggagagcccaggcccccgccccgggccagccgccccgcgtcgccccgtaggaagttcatgagcacggtctccgccatgtcgtcggcgttgtgacctggtggggagagaagggagcgggtgaggtggggcgcggagggcgctgctggccagggagccccccggggaaccaagggtccaccaggacccagagagagactgggaggagagacccacggagacccagggcacagtggggccgccaggacccagagagagacggcgacggggagagcaagccatggagacagacccccaaacatggtgtgacagccaggatccagagacagggagggggagagagagccatggagacccctagggcactgtgggcaaccaggacgcagagagagacggggagggcaagagcgagccatggagaccctccgggaaccgtgaagcagccaggtgcaggctgcaggtggacacaacaaaaaatcaaagagaaacataagctcccctggcgcaacttgggcgtgccttcatgtaccacccgcctactgcatagcggaccttatgctagttgccctttcatatagggagtaaaagtgcattatgctgctaataaccttatcagcctcagttaaaaccgtaattcaaactgtacacaaaaatcagaaggcatttaaggcatttaaccgagattctcaggagagctggaggggtaggcaggctgctgtctcccccaccgcctagggaatccatggcctaattctgggaacctgttaatatgtttggttgtaggacaaaggggaattaaggttgcaagttgaattggggctgctaatcagctgactttacaatagggacagaatggtgcgttatccaggtgcgctcaaggtaatcacaaagacccttagaggggaggagggaggcagaaaagggagagatagggccatggagacctttgaacatagtgggcagccaggacccagagagagatggggaggggaagcctgagccatggagcccctctggcaccataggacagccaggacccagagaccgggagagggagatggggccatggagccccctgggcactgtggtgcagctaggtggtggctggaggtggacacagcaggaattgagaggggaacacacacaagctccctggggaacttggggatacctcatttgccacccgcctactgcatatggggggtgtgagggcagaggcaaggttagagtgatgcaaacggtgtaggactcaaactgccatccttggctttgaaaatggaggaagagccgggcacagtggctcatgcctgtaatcccagcactttgggaggctaaggtgggagaatcacctgaggccacgagtttgagaccagcctggccaacatggcaaaacccccatctctactaaaaatacaaaaattagcaggtcatggtggcaggcacctgtaaccccagctgaggcatgagaatctcttgaacctgggagggagaggttgcagtgagccgagatcactccactgcactccagcctgggctccacagcaagactctgtctcaaaagaaaaaaaagaaaagaaaatggaggaagggaccatcagccaggaatgtgggcagcctccggaagctggaaaaggcaaggaaatggacccccttgccccagagcctccaggagaaaggcagcactcttgacactttgattttagcccggtgagacttcccagacttctatctacagaactacaagataataaatctgtgttgtttaaagctgtgaaatttgaagtaatttgttacagcagccagagaaaacaactggttcttgacacagagcctctgacaacccagactgtagtttttttatggtttttttttttcattttgttttattgtgcgtgtgtgtgtgtgtgtgtgtgtgtgtttgagacagggtctcactttagtgcccaggctggaggacagtggcacgatctcagctcactgcaacctctgtctccagggcttaagtgatccccctgcctcagcctccagagtagctgggaccacaggtgtgtgccaccatgcccagctaatttttgtatttctatacagacgcagtttctccatgttggccaggctggtcttgaactcctctgagctcaagtgatccacctgcctcggcctcccaaagcggctgggattactagcatgtgtcaccacccctgtaatcactgcagtgtttttgtgttatctttgtttagaagtaacagtgagaaatatttacacactggtcaccatgaaattgaagctaaacttgttctgtgtcttgtcaagttatacttgagtctatatcagtggttctcaatctgggatgagtctgccctccttccctcccccagagacatttggcaatggctggagacatttctgtgtgtcaggttgggggtggggcactactattaaatagcatctagtgggtagaggccagggatactgctaaaatcctataacacagaggacagctccctaaaaacaaactatctggccccaaatatcaatagggctgaagttgagaggccctggtctatatggtaaaaaacctccaagaacttggctctaattgtgtttgtagtaatggttacctcccaaagacctgccaagccctgtgaccttgagattgggcatgtttgctactgcaaacgacatctcgttgaatgtttattgacttaaagttgtaaaccacattaattaggggagactggatttgctccacaccttgtcattacaaacccacttaagagctcccagttttgtaataattattacaacaattattatactacgcctttgaaaatggagtgtataaacaaagggtagaaatcaccttgcaagtcagggatttttctggaaggcttcattacttttggaagtacaattaataagtgattctatcaaattaactttaaaatccgaggcagcctctcattctttttttttctcccccagctggaatcttgctctgtcacccaggctggagtgcagtggcgtgatctcgactcactgcaacctccgcctcccgggttcaagcaattctcctgcctcagcctcccgtgtagctgggattacagccgcccaccaccacactcagctaatttttgtattcttagtagagacggggtttcaccatgttggccaggctggcctcgaacgtttgaccttgtgattccgcctgcctcagcctcccaaagtgctgggattacaggtgtgagccactgtgcccggccgaagcctttcattctttccatacactgtctgctcttgtatggtaaggattattcttcccattttcaatcacagagatctagggatttctccaaagttactcagtaaggaaagggccacatcagtgaatgaagctcagtaagccttccccagagccagtggccctacctagcatggtggcacatgacagcctcagaactacttttgccttcatatgctttcagtgtgctgattctctccaaccatcatctctcacctccatcaccgcagctggcttcccactgactggtctcctcggctttgtccctgtccctccaacccaggttcctcgccatggcctgggtgagcttttcaaagtgaaactctcttcatgtcacttttactggttccgccacagcctacagggtaaggcctgacctcttccacctctccagcctcccctgcccttgctttctgggttccagccacactggacttcttggggcagcccaaattggcttttcacaggccaataacctctccctaattcttacccgctttacctcttcactgtgagccttcagatttcaaaaccgttccttgaccccactccctccacgtcatagggttctctgtgtgtacacatagtccataacatgtccatacatggtcaataacatgtataatgtttataattttgtacctgataaccatgcaaaggtaggaacttgtgcgtaactgtattctcagccctagcctgacaatgatgatgataatagcatgtataaaatgtgtaatctatattatatcatacgggttatgtaacataactataatatagataacgttatacttctactgactcatctaattgtcataacaagtttatgagctgggtaccattcatagtcctgttttagggatggggtgaaacagaagtacagagtggttaagaactttggtatggccacagttgggatccggcatatagcagaaacttagcatctgtttgttgaaggaatggatgaaaaagacagaataaaaaagttatcttccagcactttgggaggccgaggtgggtggatcacgaggtcaggagatcgagatcatcctggctaacatggtgaaaccccgtctctactaaaaatacaaaaaattagctgggcgtggtggcaggcacctgtagccccggctactcgggaggctgagccaggagaatggcgtgaatccgggaggcagaggttgcagtaagccgagatcgcaccactgcactccagcctgggagacagagcgagactctgtctcaaaaaaaaaaaaaaaaaaaaagttatcaaagaggagaggccaaccaagaaaaggaattaagagatggagatgctttttagagaaagagctggattctgaaaggtggaccataagagatcaagcatgttagaaacatttaaaaataagtaaaggaccagagatctccagagattttcacctcccacccctttggcaatctgtggagaccaagacggtggccaagacccaaaaacctttgtgatcactgcctggcccctctgtctccccagcgtcttgaacctttaaagggccccagccccaaactgcagcatgcgcccttccgcacctccgtacagggatcctcccattaagccaccagggtctcctcgccgccttctggagcatgcgcctgaatcccctttcaggtcccgcctcctcgcctgtgcattcgccccactgcctcggagagtgccgctctgcggcccgtactacgctcacctgtcacgatgtgcgtggctcccacgcggcgcgccccttcctccagcgcccggcgccgcagcactccacagaaggtgcagcaggagcggctgcggccggagccggctgtgctgcgggccacggcgtccatcgtccagcccccaaagaggtcttcgtaggccacgaccgtgagcggcagctcccagcgcgccgcctggcgccgcacggccgccaacgccgcgtcccggtagccaccgatgccctcatcgacggccacgagctgcagtgagatgcccaggcgcggcgccagcgcgcgcagcacgtgcgccagcaccgtggagtccttgccgcccgaggcgcccacggccaccaccgcgccgggcggcagcaggcggccggcgagcaccgtgtgcagcacctcggcctcgaaggcggcgcagaagcaggcaccgcacagcgcttggcccgagagcggacggcggagggcggcgcgtgcagcatggcaggaggcgcacggcggggcgggcattgcgggaggggtcggcttctcctagacagggagagagaggaggtgggttacatatggattccggattgcagggtccctgccatcggggagattgtctggattgcacctctgcccggaatagaccagggagacgtgtgcgcgagtggagtagcttcttctagcgctggggataggatggttataaataggtccggtgtaaggaagccactgccttagggaaggcttcttggattgcacccattatgcaagaagaagagaagtagcttaagaagctggcttcatgggtaaagagagggagcgacaagcaggttatacccaggattaggttgtgtcctctccagagggatgggggtgtatattaaggcccatttgtcacaacctccagggaggccacccttgttacagtcctgatcaggacaaggtaggtatcattggcctgggccaccagggctgttaaaagcccttgggaggtgaggggtttttgactctaagggcagagggaggccaggggactgaagctctgtgcagcgggaggtggaaaacaggaaaggccaactgattgcactttgtagggtgggatacggtctccaggaatgggttctgattgcatcctatgaaaggcagggtgatcaccttctccagggaacacaggcagcctggatcacacctctcaggagaccagctggggttgcacacattttgagggtgagaaaatgggtgggcctccaagattgaactcaaccctgctctggtatcagaatgccccacaagcttctgtgctctcaccaagacatggatcggcccatctttgaccttcatctgttatctttcctacttcattcttccccacccagcctagactccaaccctccagtcaaatcctggtcctgcctgcctggtgaacccataaaaactccccaggctcagttctcctccccaagccaccatcacctccagcctggactactgtagtcacctccttgccattcagagcaggtcacgctgcttctaggatttaccacaatgtgtggaattattttatgtgactatatatttaccatctctaacttctatgagggcagagaccagtaccactcagatgtctaataggcatctcaaaacccaaattcctgattcttctaacccagcgtgcttctcctggagtacagggcagctccatccttctagctgctcaggccaggagctttggggtccaggaccctggactgctctttctctcactgcacttgtcatgctcccagtgggtggcaccaaactgcaatgccaagtccggaccttttcaaactccaggtacctaaatgaaatttagcaaatcctgtttgaatgtagtttcaaaacagccaaacacttaggaccgtctccacggcagcaccctagtctggtctgtctctctcctggacggctgcatggggctccccacaggtctcctgctcccgccttgcctcctctacaaacactccttcacataacagccagtgggatcatgccctgaatcttctcagcatcctcccctggatcccatctcactttagtataataactgctaatggccgatgaggccctacatgtgtggctccttgtttctccaacctcctctccttcagccttgatgtcgtttactctgacacctgaggaatactcctgctccagatgtttgcactggctctcccctctgccctgagtactcttcctgccactgagcccaagaagcagcccttaggactcatctgcagtgaccgtcgggaacatctgtcacaggtgagcagcaactcttggaatctttcttcccccgacttttgactcactccttctgtgctcctggatttcctgctcaattctcttttggggacgcctcttcatgtcctcaggtcctgcctagcacccatctctttccattttttaaagatttttaatttaatttaatttaattttttgagatggagtctggctctgttacccaggtggaatgcagtggcacaatctcggctcactgtaacctctgcctcccagggtcaagcgtttctcctgccttagccacccgagtaactgggactacaggcgtgtaccaccatgcctggctaatttttttttttttttttgtatttttagtagagatgcggtttcaccatgttggccaggctggtcttgaactcctgacctcaagtgatccgcccgcctcggcctcccaaagtgctgggattacaggcgtaagccactgtgcccagcttctttccattcttatgagcgcctctgaatcatgatattcagatgtccctcctggctggtcctccacatggctggggcaccttaaagatgttcagaccctaagcgcccagacaacctatttcttcctcgaaaggcagaaacctgttcttgcccatctgttccctctcttctgagagcagccaccacctttcatccagcccatctgcaggacaggacgtaacgtcaccctggactcatctctcctcaccccctaaatctacagtcacccagtcctggggggtccacgtcctgaggaagggagacgctcgcaggggacaaggctgcacaagttagcagagcctcataggccatgatgtggaattttaggtttattcaggaggagatgggagccttgggaggtttttgaacagtaaagtggtatgatctggcatgttttaaaaggattcctagactggtcaacatagcgagaccccatctctaaaaaaataaataaataaattagctgcacctggtggcacaggcctgtagtaccagctactcaggaagccaaggcaggaggatcacttgagcccaggaggtcaaggctgcagtgagccatgatcgcaccagtgcactccagcgtgggtgatagagtgagaccttgtctcaaataaaaaaagtgggattcgtttggctgctgtgtggggaggactgttggttgtcagggacaaggacagaaggctggaggtcagcacactagacaggagtgctggcagtagaggtgggaagaagtgaaattttggatctattttgaaggtggagcccacaggacttgtataagactgattggagtggggactggggcaacgacgagagaaagtgatgaagggtaactttgaggttctggcctgagcattggagggacggtggggccattttgtgaggtgagaagaccaggaattccatttggccacgtcaggtttgacatgcatgttaagcgtcttccctcaaagactttatggaccctcgtcactgagtcgagcgcctccaccagggccctcagagctgccctgatcctgactagctgtcactggtgacaggtctgtctctctgcttcaaggcagggacagggttggtctggtgccctcgctcccgccgccctgcgcagagtcggtgctcagtaagtatctgtaggatgagggaataataagtgctcccagaagagaggccgcggaccccagggatgcctctggattgcagccttgtcaaaaggacagataatgtgtggcatgggggcggggacaggcagatagtaacataggggcgggggcaagcagatggtcttatcctgtcttggggaagggagtggcccggtaagagacaggccggaccgcagcgttcaaagtgggaatcctggctacaaggcctcagggacacgggcgctgggaaatcacagaggccttacgctcgaagagaccctcaaccctcccacggcaccgcaacaaagagccggagtccacatgccgacccaccgcaggaggaaatactcacccgggcagaactcagtgctgggatgcccacactgcccaccacgcggaagcctggcccggaagtgactccgagactaccactcccataaggtcttggggctttcttgcctagaactcccagaagcccatgcgacacttccgctggatgcgcctacggctccggggtcccgcttggcctacaactcccagaaacacttgcattgctctttctgccgctcccaaaatacactgctccccctccccccgcgtttactttctgcgcctgcgcgcggccgcagggagcggcggagctgcgtgtactgttgtcatggcagcgcgctgtcacccggcaggttgctggatgggcgaagtagttgtattctgattaactgattttgtgggattattataggattttaaggggattacagggcctatgatttctgccctttgaggcggggttgcgggtgggaattgaaggtggaactgcaggggttggtcgctagtgtaaaaggcgcagatagcgcatgcgtagagcagacttcgaggattggagtggaactccgcgcgcacgcgggggctgtcgtgatgcgcgtgctggagacccagactctaaacagaaggatccaaagacccttctcacctaacccaggagcccagaggctcagagactcagacccttgagactaagggggttaaaaacgcagacccctggcaccaaagcacctgagagaaccagtagacctggagacaaccgtctgcaccctagacacagggatctggaggcctccaccctccccacaaggcccaagggtcttgaagaccccggtgactcaaataccggggcacaaggagtttaaggactcagatatctgagacccttgagatccaggtccccaaacctaggtcctcgaaaaaactgaggctcaaaattcctctagacggcgcggtggcttacacctgtaatcccagcactttgggaggccgaggcgggtggatcacgaggtcaaaagatggagaccatcctggccaacatggtgaaacctcatctctactaaaaatacaaaaattagctgggcgtagtggtgcgcgcctgtagtcccagctactcgggaggctgaggcaggagaatggcttgaacccagaaggcagaggttgcagtgagccgagatcgcgccactgcactccagcctggccacagagtgagactctgtctcaaaaaaaaaaaaaaaatcctctagattaagggaccaccagagccttagactgagatgtggagatgtgcagagagccccaggatgtgtaggtctacggccggtgatgacgtgagaaggaaccccatgcaccctgtagcccatttttttcccccataacaggaaaccatgatgccttcctttcatattaaatgagctccgtgaggtcactcttaagccttatcatgggccagttctgttcatctgtgtgcgttggttcatttgttgaatttatttcctgaggtctccttgtgccaggctgcccctgggctaggtttaggtgacacaaatgaatcagacttggttactgtcctctgagcatcccccaccccttacaccaccaccctgtcctcctggtgggggagacagggacttagtcaatatggagtgataaagcttgacatggaagtgttaagagccttgaaagctcaatttcaatcactgccagccagggtgtcagaaaaaaaaaaaattcaacaaaggctgctatgtgccatgcatcatctcagtttgttcatctgtgaaaggggggcaataatagcctgcctcataggatttatgcgaagtcaaattgaattaacaacacctctaaagaatttagaacagcttctggcacatagtatgtgctcaacaagtggttattattctcatctcaattctcataacattaagattatatgttacatatgagttgggtacaactgtaattcttcttcttctttttttttttttttttttgagatggagtctcactatgtcacccaggctggagtgcagtggcgcgatctcggctcactgcaacctccaccttctggattcaagtgattctcctgcttcagcctgctgggtagctggaattacaggtgcgctaccacacctggctaatgttagtattttcagtagagacggtgtttcaccatagtggccaggctggtctcaaactcctgacctcaagtgatcccaaagtgctgggattacaggtgtgagtcagcatgcccagccttgtaattctacttaggtgaggatcttgaagctcagtgatgtcacttccctggactgcctgactctacagcaggggttgcaaacctttcctgtaaagggccaggtagccaatattttaggctttgtgggccacagggtctttgtggcaactctgctgttgtatgttgaaagcagccattgatataagataagcaagtgagggtggctgtataccaataaaactttattgatggacactgacatttgaatttcatgtaatttgcatgtgtcaggaaatattcttcttttgaagaattttgaagattttacaccatttaaagatgtaaaatcatttgtagcttgtgggccatgtaaaaacaggcagcaggcccgatttggctggtggtctctggtttgtagctccttgctcaaagcctgtctccttagtctccaagctgtgcttgctcctggaagaggtgtgaagtgtggcaaaggaggttgagaatttgagggtcgaaatggccttttaatacagaagaaatcgcctgagcaaagaaagatcttgtggcaagaaagcacagggtgccttttgtttgaatgcaatttatgttatctaatcaggttatgcacttaaatgctataaaatggaaacagtgcatagactctacagtgaagtctccctgtcgtctccccccacccacccactgtctagttctcctcctcagaggcagcctctgtcctgcaacaatgtgggagtgcatgctgaatcggggtgtatagagtttccccattctcctctgtgggaccaggataagagtgggatatttggggctccagagatagatgggaaaagaggtgaggtcagccatgagaagccctctcactcccagccctctgctgtctggtttctttcctgtctcccctaacacagtctcccgatcaacaccagtggcctctttattgacaaataaaggtctaacctgggctctacctacttctgagtctctttgccctgaccacaaaatctaccctccctggtcctctttctggccaaaccatgtcaatcaacttgccaggagccttgtactccacagcgctgtcatttctctgcaaactccccaggtgagctcatccactcctgccactcccgcaacttccgtctctgccctgatgcctccccactttcctgcatatctccactgcatcccgagactcggacctgcacagttagcccctggtggtggcactggcatgcttcagcctctaggtgaggatcctgaatcacttcgctgactctttttctcacccactgctccccattgttcagtgaaacttgccagttttgcttcttgaaagtttctcagaccattcccttcatccttgtggccctgccttggctcagctcatccttttttttaaattattcatttatttatttattttttttgagatggagtctcactctgtcaccacagctggagtgcagtggcatgatctcagctcattgcaatcttcgccttccagcttcaagcaattctcgtgcttcagcctccggagtagctgggattacaggtgtctaccaccatgcccaactaatttttttatttttagtagagacacagtttcactgtgttagccaggctggtcttgaactcctgacctcaagtgatctgcctacctcggcctcccaaagtcccaggattacagatgtgagccactgcgccggccgtttcttgcctggactctctcaccccaacctctaatcccttcattcctgaatcctcccacactagccccagatttaaccttgtctctccccttctcgaaactcttccatggctccccattgccatcaggctttccattgtcaaacctctgcagactgcaacggaggtgctgcatgatctggtccctgcacacccttccagcctcagaatgccttgccatctccaggtcatctagctgccatcctaagcaatccgcgtctggtggaagatatggtggctgggctcagctgtctctctccagctctgggagctttggttcctgcagcatcaatgtgcatctctgagggccatttcctatatctggtgcttgttactggcagcacttgcttccccacccctcgaagggctagaagcttccctgggtagaatttctgcatgaagagagttcgttcacccgtggagcctactgaggaacgggatttttgtctgtggttggttggtttgtctgttttcattgtagtgtatcaaacagtccttattttgccctaagtccagctctgtcccactgccttcttgttagtttttgcatctccttactaaatggtaggtctgcctgggttcccacagcagtgctaataaactttgttggccagaggaggcaccaggaaagactctctgttggcaacactctctgaagggccctctgtttctctttggccttgtctctcgttctcctcatcccaggagccttttatgtgagtttccacagctcctcctcgcaccctctcttctctctgcacttctcgtggctccccccgatgtcttgcacaccatgctgttcatcccaatctgctctgagccccagacaaccacatttccccccttctcagtgatggaaccatcatcattatccaaattaggattctaggagtcagatagatatttctctatcacctaccatatcctgtttgcaagatgtcttgcaaacttcccttcctggaataggctcacttcactcccccttcaacatccccatggcctctgctcctagtcatttcatcctcttcctcttctgctcagacctccactctgttttcctctccaacttcttggcctccactctcctcctctccctaaagtctccctcacatcaccccagagggataccttctcccaccaagagctgactctgcccctcccccttgctcttaatccttccatggctccccagtgccctcaatataaagtcaagactttttttgatatgtaagcctgcaagatacggcttgcaactattcttccagagtcatcatgccttgatacctacctctggggtcatttagctgactacctgccccacatttggacgtctctgaacatttgtcacctggtagcccaatccttaagaggggagaaacaggcctgccagtcttgcccttcccctttatctgtttgtgctcagctctggggccctggaaaatgctcctcactcctcattcccagggcaagtctccatctaacatgtagtaataggtgaagacatttttgtctattttgttcaacaagaatcatacctgacatataataaactctcaatatatgtattcaaaaattaaaaaataaagctgttacttgtgaaatctctgcctgtagcccaggtctttgttctgaccccagcaccctcctaatggccccgttgtctgtgaaggcattttcaatgctctccactgtgctagatggtgagcccatagggacagaaattgggtttgttctgactcctagagtgacttggtaaatattgttgatataggataaggctcagagaaacctctgtctcagtttgataggaccccgagaaacaaaactggcaagttggagaatctagctcctttacagccagcagcaagtgaggctactctttgtcctggagggagacattaccccatccctcagggtggctccctgcaaacacaacctgagaactaggccaggtaacgagatctcagaccatcatgttttgggcaatacccaacgagatgtgtaggaggacgggaggctcatggagatctgtccttcccaacaggctgccctactcttcttagatgatgtgggaaactgcaaaatcctctcatcaaattctcttttaccagcatacacaaagattccatcacttgtgatcgacgtcttagtcagtaagtctggaccattttgactggtttccagtcagaaaaccaggaggatgtggtgaacagagaaaccccagtactcacatttcactattctttgctttctctcttcatgctttgtttgaagaagttgcaaaatgagatgactggaagaaagggacatgatagctaaataaagcttccttttcttggtcaggcactataaatctattgcactttctcctgtctaacagaagtcaaacttttcttttttttgagatggagtttcactcttgttgcccaggctggagtgcaatggtaccatctcagctcactgcaacctctgcctcctgggttcaagcgattctcctgcctcagcctcctgagtagctgggattacaggcgcccgccaccacacccagctgatttttgtatttttaatagagacggggttttaccatgttggccaggctagtctcgaactcctgacctcaggtgatccgcctggcttgccctctcaaagtgctaggattacaggcatgagccacaacacctgaccttactattgtaagtattagttctaaaaactggcggcccctcctctgagtccctgtcactccagttctcaatctctctccatatggctcaatgctctcctggaatcattgtcccttcaggtccccattaggatcttcagtcttaggcccattttttccccctatagtttttcctatagtctcattatccttaagtgaacaggaacaacaggacatccagcagagtccctgaggatgaactgggaagcagagaggaagaacataagagaagctcggcctactgatgacagaatctgttgctccccaaatccttttctcttgggcaagccagaccttcccaccagcccatgttatatggctgcccttttggctcgaggcttaggtttcatgctcgtggggtcagacccctctgcagagccgggtaatacctgaactcaggagctgatggtgctgcagttccacggacggacagcaccatccctgctgcccggggcttaccaggtccaccctgtcttggggggacagctatgactttgtgtgtggcccctcctttatctgcatcccagaaaaattctttcaagataaggttggagggaggagagagttcactatatcacagcacataaaggatcggggcagatacacatttctaggtcctcaccctacaatcctagggatgtcacctcaactaccctgatgtgtgatgtcttctgaagctcacgtgatcaccagcccaatgtctcctgtggtggtgcagcagggtgggtgggggagccaggattcccagtccctgtgcccaacacggggtccaaggagggttcaggacttgggatacttagcgcctggttcctggggaccagactgaggaggggacaggaggaattcctcaacccgccttctttgctgttttggtgactgtagaaggatgcagggccaccaccccacttcacctcctacaccgatgtgggaactgttctatttctgtaccagacactccagttttgttgttgttgtttgtttgtgacggagtcttgctctgtcactcaggctggagtacagtggcgccatctctgctcgctgcaagccctgtctctcgggttcatgccattctcctgcctcagcctcctgagtagctgggactacaggcacctgccaccacatccggctaattttgtttttgtatttttagtagagacggggtttcactgtgttagccaggatggtctcgatctcctgacctcgtgatccacctgcctcggcctcccaaattgctgggattacaggcgtgagccactgcgcccggctgagacactccagtcttctagacatcattgcctttcaaggaaacagcacaggtaagaatcttccttcttcggggctggttggaaatggggtcgctgcccacccacatcagaggtggattcgaggctcatatgatgggaaagatgagatttgacaggagaagctctcattccaccacagtcaggcttttgcccacaaaccttcatttaaaaaccatggtcagtccaagatcaccaccaccattctctcagacctcacaagttgaagccttggaaactgagaaatggtagcatcagcaccaaatactcaagaggacagatgccggtggggaatcccaatcccccaggcttctgttctggacctggagcctgagacctctcgggggaaggggcacctcaaacacttgttcttgtggatcgactgtgtctctagttaatagattacaagtgactttatgcaaatttgttagtatagggaaagaaatgcaggctttagaataagagaaacatggattctatactgattcctccacttactaagaggttgaaaatgggcaagtcactttacctctctgtgccgcagtttcctgcttgtaacgtgagaaataacaagccccagcccacaaggatggcgtggcacatgccaatcaccatacccaggtcctggcacaaggggcgggttctgtgtgtgctggtttcttaccccttgaatagtaaggtcctgggatcaacttgtcctgatgctaggactgcaagttccccagtgcattaaatgaatgcccgacatttaaataaaaggagatgaaacttcatcagcaatgtcaaaaccagcaaatgaataaaacatcgcaccacacacttcaaaaggggatcaagtaggaaggacactgaaagatgtggggtggcactaacaactttctccccctgaatggtggggaggagtccccagaagcagctatggaagaaaatttgggctgaattaaccctgagaattttccaagatgcccccgcccccatatgcacatgtgcccactcatacgagtagacaaagctggctaaaataaacaaaaagaattccagagaagaagccttacatactactggggccatatcagaggataaccagaagttaacatcttttaacaccctgttttgagttgaggttattgagaaattccactctaaacaatacccaacataagtgcatatacataccagaagacatgttcatagcagactcctcataatagccccaaactaaaaataatctcaaagtccatctaaaaatgaagagttatgtagtgttcagtatatgcacagaatggagatctttcagcagtgagaatgaatgaattattgacaggtgaaacatcatggacaaatttaacaaacagagattgagcacaagaagccagatacaatggccgggcgcagtggctgactcctgtaatcccagcactttgggaggccaaggcaggcggatcacaaggtcaggagtttgagaccagactgactaacatagtgaaaccccatctctactaaaaatacaaaaaattagctgggcatggtggcgggtgcctgtaatcccagctactttggaggctgaggcaggagaatcgcttgaacacgggaggcagaggttgcagtgagccgagatcgtgccactgcactccagccggggggacaatgcaagactatgcctcaaaaaaacaaataagtaaaaaataaaaagaagaagccggatacaagagtacacactggccgggcgtggtggctcatgcctgtaatcccagccttttgggaggctgaggtgggcggatcacaaggtcaggagatcgagactaacctggctaacacggtggaaccccgtctctactaaaaatacaaaaaattagccgggtgtggtggcagaggactgtagtcccagctactcgggaggctgaggcaggagaatggcttgaacccaggaggtggagcttgcagtgagccgagatcacgccaccgcactccagcctgggcgacagagcgagactccttctcaaaagaaaggagtacacactgaaagttacataaaaacacaatacagacaaaactaatccatgataataggagttatactggtgactttgcaggcggggtaatacctaggaatgggaactggtgaggctcctgggtgtaggttgttgttacaaaaatgtattcatttcatagacattgatcaggcatacctttataattggaacagctttctccatgtatgctttgcttcaaaatcttttattttaaaagactataagaggaagctggacacagtggctcatgcctatagtcccagcaatttgggaggctgaagtgggaggatcacttgaggccaggagtttgagaccagattgggcaacatagtgagatctctgtttcaggaaaaaaaaaaaaattagccaggtgtgagggtgtgcacctgtagtcccagctactggggaggctaatgtaggaggatcacttgagtaggtcaaggctgcagtgagctgtgatcgtgccactgcacttcagcctgggtgacagagcaagaccctatctcaaataaaagactataagagaatacttcacatatatatttgctaattaattttaaaatttacataatataaaaagattattgcaaaaatataaataactgggactgtctcaagaaaaaaaaaacccaaatagttctattgtcttagtccgttttgtgttgcaggttaaaggaatacctgaggctgggtcatttataaagaaaaaaggtttatttggcccgtgattccgatgtctggaaaggtttgagattgggcatctggtaaagtcctcaggctgcttccaatcctagtgggggatgatggaagagggggctgatgtgtgcagagataacatgataggagaggaagcaagagagagggagggaggtgcctgactcagagcttgagcaccgactcactggcaggcaggggcactcatctattcctgaggaatccagcaccatgacccaagcacctcccatgaggccccacctccaacactgggatcaactctcaacaggtttgagggcacaaacctccagactacagcactgatattcatataggaattcattcagtagcaaacactgatttccagggaagaaattcacgggtaagttcttctgaatatgcaaggcagaaatatttccaggttttcatgagcacttccacatgtggaagtctttctgctggcgaaagacacattcgccagcaaactctgaggagtcttttgctttccctagacctcactgaattctgcacagcagggaagaggggaaggctgatctcagaaaacctcccatctctggcagtggtgggtctgacactgcacttatgtgcacgattaccattttgtccaaaccccgtggcttcctgttggggtttacccttgtttctcccagactattcttcccatacggagggactcttgtgaccagactgtcctggggcagtgcctggtgctcatggctcaaggcacagttctgctggggctggtgctgctgccatccaggtggtgagaaagtaagcagacccagaggggtcctgagcggggagcggggtcagtgtctgagcctctccttctctccccaggggctttggcttaggatccaggagatggccttagagtgcaggagctggtgacggtgcaggagggaatgtgcaggcatgtgctctgcgctgttttctaccccaagtattactgggcaggatccggcctagctcatggttactgccaacaggatgaagccactcctggaaggaacactccagtggctacaaacaaccccaaacaattgcaggagaagaaccagggccagttcacctcgttggtcatccccagacctacagctgctccctgaacctcagagatgccaatgaggcggatacagggacgtacttctttcaggtggagagaggttattacatgaaatacagttacggaaatgagaagttgttcttgcatgtgacaagtagaggaaagtcccagaaaaggagctctttctcctcattcggggtcatgggaagcattcaggggccctggggtggggctctggcacagggagtgcccccactcccagaaacaggaatcagcccctttctcttttctagtgctgacccagccacctgagatccatgtccagaagagctgcaatcaggtgaccctggaaatctgacttgcaccgtatcatgggccggtgagaagggaaccccaccaaatttcttctggataagagaagccaccaattttacagtctccaagacccctcttcccgaccagtcctcagttctcagccttatcccacagccatgtgaccatggcagcaacctcacctgtcaggtgaagttcctccgagctggtgtgaccatggggagaaccatccagctcaatgtctcttatgagtggtggatcaggacccccatgcccagggccctgagaacaatgggtgtcaggagggaagggaggtcagaatcaggaattcttttttttttttttttttaagacagagtctcgctatgtcacccaggcttgagtgcagtggcgcaatctctgctcactgcagcctccgccttccaggctcaagcgatcctcctgcctcagcctcccaagtagcagagactacaggtggcaccaccatgtccagctaatttttaaattttgggcagagatgggttctcactgtgtcacccagtttggtgttgaactcttaggctcaagtgatcctcctgcctcggcctcccaaagtgttgggattacaggcgtgcaccactgtgcctggccagagtatgagtttttttgttttttgttttgagatggagtctcgctctgtcacccaggctggaatgcagtgacatgatctcggctcactgtaacctatgcctcccgagttcaggtgattcttatgcctcggcctctggagtagctgggattacaggcacctgccaccatgcccggctcacccttgcctggctcagctttgagctctgtcttgatgcctctcctactttctgccccttgatcctcctcttatgcatggcgtctctcttcccccatttaccccattcaggatgcagcacttcctccaaatgtcacccttttcatccactgtactcatgagccagtgggtgctgtaacttcccttcctgaacaatgtctcccgtcatgccctccttgcttagtcccctgtcctccatcagcatgaccaggccctttgctgtcttttttttttttttttttttgaagatgaagtttcgctcttgtcgtccaggctggagtgcggtggcaggatctcggctcactgcaacctccgcctccttggttcaagtgattctcctgcctcagccttctgagtagctgggattacaggagcatgccaccatgcctggctaatttttgtacttttagtagaaacaacttttcaccatgttggtcagggtggtctcgaactccttgacctcaggtgatccaaccgccttggcctcccaaagtgctggggttacagatctgagccgccgcacccagcctctttgctgtcttgatcattgttccatgcccctccccagcctcccatcttcccttcatgctgtgcccctgatagcacaagcccagaaagaccttcctgtacccagtaccagccccaccccttcctggcccagagtcccctgtgactcctcggcaccctcagtctaagctcctcagctggtcatgccccaacacctccatgtccccttggaagaccccagatatatgtgcaggtctcttcatctgccagactgtttcagagcctttgcacatccctcgtccttcacttgtgatgcctgtctgtcttgcgtcaatatgacccactcccccttccaatctcagttcagcctccttccctccagggtctgtcagctagcgtggactccgggatttgtgtacataagagcatgagccgggccaggcttggtggctcacgcttgtaatgccagcactttgggaggctgaggtgggcagatcacgaggtcaggagttcaagaccagcctgaccaacatggtgaaatcccgtctctactaaaaatacaaaaattaacctggcgtggcggcacatgcctgtaatcccagctactcaggaggctgaggcaggagaatcgcttgaacgtgggaggcggagcttgcagtgagctgagatcacggcactgtactctagcctgggtgacagagcaagactccatctcaaaaaaaaaaaaaaaaagcatgagtcaaacagtcatgtgtcttctgtctcattccgaatgggaggtaagggagaaaccgacctctcagcaccactcttcctgctttctctgtttttttcgtccagccccaaagaccctgaacaatggtacaccactgcctgtcctggagggagagtccctgtggtctgtgtggctgacagcaccccacctcccaaccccgcccggctgagctggtcctgagagggaagaacactgaattcctcccagctctcagcacccgggggcctggagctgcctcagataggggctgggacggaggagcattgacctgttgggctcaccacccactgcgatttcagcacatttccctgagcctctgtgcagagtgagttgcaggacagctgctgaggcaggcagcctagtcgggtgtttgggctgtcagaggggtggaggcctgggaacagaatctcacacgcttctaccctttcccaggaagcccctctggctacagatgtgtgagtgaaaagcaggagggcttctggcccctggttctcacctgatcagggggccatcctgggcactggcttccccccaacccccatggcctcacctggagctactactccaggtgagcaggcctgctcttttctagggaagccgaaggattgttccccgagttccaggtggggctgagctgtcctgtcccgcctgagttagaattgaagtggccgatgctaatctgaggcccgtgttggctctgcaggtgtggagggccccaggggagcagtgctgagaggcctgactgagcccctcctgctcaagacagaactcagatgtggacacccagccctgcagaacagatgcaggacaacactgtcagccatggctcagcccttctgaccattgcagttgagatgctgcaacttcccagggagcgactgggcaaacatgggggcctgaggtattcacggcaacgtgcacagatgataaaactacctagaaaagcatggagaccattagcgttaaagtgaggctggggctgcttcaggaggaagtggggtgtggctgacaggaagtggggtaacaaagaggaggtgttgcggcatccccagtgttctgtttctctaagcatgttcatatgtgtaaaccgctgagattttttcttggggggaagacatttttatctatatggcttatatttctcccaaaaatatttctagaaaactgacatcggtctaaggaggctccaccacacaggatactcccagttcctcccagcccagccacacagttacaaaaaatcttctgctgaattcaggtgcatgtttcttctcccatgaaatcctgcccatcgcggagggtgcatgccccggggctggtgtcctcactccacatctcctgttcaccgggacccctgggagcagagcttgcagaagcaaagccccagggccagctgatccctcatgttctggagtaaccagggaagtgtggctgagcgagacatcggtggtgaagaaacccttcgtggtgcagtgaggaaaggagaaatatcttcccttttgaaatctgccccttttcttccgaatttcctcccttccaagccccacagtacaacagtcacagcctcagtttcccagacctcctgcgagccaggctcccctctgtgtccttggcgtgtatcaacacatagaatcctcacctccacagccccatgtccctctgctcagtcctcctgagattgaacccctgacctacgggagagtgaccccatcctgcctgtgccccccaactgaagctcctgccgtggacagctcagacgtcaggagcctccatgtctcccctccgcacagtgaccccttggggacagtgtccagctctgctgtgttgacctcgttgtgcagaaagggggtgcccacctcgtgcttgcttgggggggatgagaggctgcctgctcaccccacctgcacccccatctctcatggccccaagtcccacctctgagctacgcagatatccacagcctctgactcaggggtctggccagatgggactcattttcaccctgcagaaaatgtcacctaaggggaagggcattgagagggaggcaggaggtggggtgggccctgcatggggtgggaatctgggtgagtctgtctcccgctctggcctcagggacccaggagtgaacatggggtggtggacggtggatctcccagggctgacccgggcctgacagtgtctgggtgtaaagttcctcctctgaggaggtcactgttccgacctcgcccctgtcttcctgtagggcctcctctaagtcttgagcccgcagttcctgagagaagaaccctgaggaacagacgttccctcgcggccctggcacctctaaccccagacatgctgctgctgctgctgcccctgctctgggggagggagagggcggaaggacagacaagtaaactgctgacgatgcagagttccgtgacggtgcaggaaggcctgtgtgtccatgtgccctgctccttctcctacccctcgcatggctggatttaccctggcccagtagttcatggctactggttccgggaaggggccaatacagaccaggatgctccagtggccacaaacaacccagctcgggcagtgtgggaggagactcgggaccgattccacctccttggggacccacataccaagaattgcaccctgagcatcagagatgccagaagaagtgatgcggggagatacttctttcgtatggagaaaggaagtataaaatggaattataaacatcaccggctctctgtgaatgtgacaggtaaggcacaggctccaggaaaggccacagggaaaggtcatgggggcggcagggaaaggctgggatggagcccctgccccaggagagggcttagggtgaagcgagttggctcagggcaggagctggaccagagcctgagctccccccagggctgcaccatggatcctctgacctgatcctgagtccccctctcttcaccagccttgacccacaggcccaacatcctcatcccaggcaccctggagtccggctgcccccagaatctgacctgctctgtgccctgggcctgtgagcaggggacaccccctatgatctcctggatagggacctccgtgtcccccctggacccctccaccacccgctcctcggtgctcaccctcatcccacagccccaggaccatggcaccagcctcacctgtcaggtgaccttccctggggccagcgtgaccacgaacaagaccgtccatctcaacgtgtcctgtgagtgctgggccgggacgcctgggtccctgatggggtgagcgtcaagcctggacactgggtgctgggtcccggaatctgggctggtggtggggtcaggaggacactggctctgccttccctgtttatgcggctcctggggacagacagggccagtgtccccagccctcacagtgatgcgggtctccatgtctttctgtcccagacccgcctcagaacttgaccatgactgtcttccaaggagacggcacaggtaggatggagctccctccctggggctggaggagcagggccttcaggtcaggatggggctggcttattcctcaacctggactcactttggcaaacagggatgtccttgtgggtgaactcagggcccctctgtatccttaggccccaaggccacttgttcccatcctcccatcacctcccttggactcccccacacacccccccctcagcctcaaacaagaagagggtggcattcacacagcaggaccaggctttgaggctccttctcatgtatctcctgaatacatctccacccttatctgtttatttctgatagttctgatctaagtacttctggacaggtgataaatgtccatgggcaaaaattcaaattgcagagcaaaggctctcctccgatgcctgcccccctccccagaaccaaccactgtccatccaggctgccctgagtctcggtttgtacacctggaggatctcagaggtggtttgacgtccgtagtgagactgtccgcaccctcctctagggctgtgtgtgagtccactgcatggatggactctgattttgtggcatctcctaatggaagatcacggcactaatttcatcctacggcaggatagaacaatcttgtatctacttccacaggaatatctaagcctgtgggttaagttcctaaaagcaaaatgtagctacattatatgttctttcttattttgaaagataagcccaaactgttctcgatgaagcggggagaagtttacattcccagcagtgagtggtgaaagtgtgtgtttccagaacttcagtctatgtctgtgtgtcagttgctgtcatcagtctctttctgtatccttcctttttctccagatctatgtatctctctgaccctctgtctctttttctacagtatccacagtcttgggaaatggctcatctctgtcactcccagagggccagtctctgcgcctggtctgtgcagttgatgcagttgacagcaatccccctgccaggctgagcctgagctggagaggcctgaccctgtgcccctcacagccctcaaacccgggggtgctggagctgccttgggtgcacctgagggatgcagctgaattcacctgcagagctcagaaccctctcggctctcagcaggtctacctgaacgtctccctgcagagtgagtgcaccagtatgctggggaggggctggagaggagaacacacctcctccacccttagtaactgctgagcgtggaccttcagagaggagctccgctctggtctgtgctcagctgtgaggtctggaacttccctgggacccacagcaccactgtcctcttcctgccagggaagggttgtggggtggggagagggcaggagtggatctcagaggggacaggatggggccggacaggtgtgtttagggagacaagcgcctttctttgcagggctgaactggagtcacacaactgagatacttgctttgagcatcaaattaaaaaaaagaaaaagcccagcaagtcagcaatcaaatgaaatcatattgcaatgcaataatcttttaaaaaaagtaaaaattgaatgcaaaacaaattcattaatggataaaatattaaaattgtgaaaaaaaaccccaaaaggaatggctggcacttgcacgcctcactggcctcaggaagagtctctccatgtcctgctctctctcattcctgttctttgtgtctggaaaggggaagtggaaatagaagtctaggaccctacaggaagtgggaggagaagagacccaattctctatgatatatcacaaaaataactcccatctgtcaacaggcaaagccacatcaggagtgactcagggggtggtcgggggagctggagccacagccctggtcttcctgtccttctgcgtcatcttcgttgtgtaagcatggaccctagagagggagggagggagagccctgggggaggacaggctggaagctggatccctgaagccagagctggagggacctggatgggtcaagagcttggggcaagaaggaggtcacaggtgcatggtgagaattccatgtgggcctgtgtttgaggagctttgagtctgtggcaaaccttggtacccactgtccaggagaagagagcctctgttctcaaccttggggtctctaagactggaccactgctttcccacctcagtcacccctgcagtcccttaataggaaacacatgggggtacctggtctgcccaccgcaccccaatctgaccacactgaaaggctctctggtctcttcactcagagtgaggtcctgcaggaagaaatcggcaaggccagcagcgggcgtgggagatacgggcatagaggatgcaaacgctgtcaggggttcagcctctcaggtgagtgatgtggactctccacagccagcatgtagcctggacacctcccacaggatgacccccaggactaatcagctgggcgtagccaaagttacctcctctctgttcttcctttcttctctgtagccccaaatcacaatgtttggttggtttcctcccctaagaacagcttttattgtctctgctccctatcctgacccttcattgctgaggcctgaggatctctgtcttttgttccctcacctgtctgcctgtctcctctcctttcctgcctggggggactgtccagaagacatcatcgtccagttcctctgcatttgaacagctgttcccccacccctcaataccgtttagagcagaagccagcaaatactatctgtcagggacagatagaaactattttcggcttcatgggccacacagtctcattgcagctcctcaaatctgctgttgtagcaagaaagaagccatataccctgtgtaaacaaatgaatatggctgtgtgccaataaaactattcacaaacataaagagtgggctggatatgactcagatactgtagtttgacaacccctgatctagagtaaaaatcccaaactctatagcctgcagcagtgcacattctgactttttttgtttttttttttttttgttgttgttgtttttgagacagagtcttgctctgtcgcccaggctggagtgcagtggtgcgatctctgctcactgcaacttccaccttccgggttcaagccattctcctgcctcagcctccggagtagctgggactacaggcgcctgccaccacgcccagctaatttttttgtatttttagtagagacggggtttcactgtgttagccaggatggtctcagtctcctgaccttgtgatctgcccaccttggcttcccgaagtgctgggattacaggcgtgagccactgtgaccggccacattctgaccttttaagcacctacctctccactagggcaagaacaagggtgaagtgagtgaggctgttgcctcaagtgcattttttcgtttgtttgtttttgttttttgagatggagtctcgctctgtcacccaggatgtagtgcagtggcacaatcttggcttactgcaacctctgcctcctaggttcaagcgattctcctgcctcagcctcctgagtagctgggattaaaggtgcacaccaccacacctggctaattttgtatttttagtagagacagggtttcaccatgttggccaggctggtctcaaactcctgacctcaggtgatccgcctacctcagcctcctgaagagctgggattacagatgtgagccaccgcgccccatcctcactgtctgctctgactcacttctctctcccatgtctcaggggcccctgactgaaccttgggcagaagacagtcccccagaccagcctcccccagcttctgcccgctcctcagtgggggaaggagagctccagtatgcatccctcagcttccagatggtgaagccttgggactcgcggggacaggaggccactgacaccgagtactcggagatcaagatccacagatgagaaactgcagagactcaccctgattgagggatcacagcccctccaggcaagggagaagtcagaggctgattcttgtagaattaacagccctcaacgtgatgagctatgataacactatgaattatgtgcagagtgaaaagcacacaggctttagagtcaaagtatctcaaacctgaatccacactgtgccctcccttttatttttttaactaaaagacagacaaattcctacctctctgtaccttggtttcctgctctgtaaaacaggaatgagaagccctacttgcaaggttgtggtcaccattccaggagtcacatcccgttagagctcctggcacaggtgtatgccgagcactgatggatcgctgtgctttgaacacaaaggtcctgctgggaacctctcctgattctggtggcaactagtacttatatgtctgtgtcacttgcctgcaaaatagcgattctgcaactttccaggaaataacctcagcctgcaaatcaggtctaggtagcatctggatcctgcccacctcttcagcctcatctgcccaccctgtgactgctaggccgccttactctctgcagtctacgtattgtgcacagtccagtgggaatctttaggacacactgagctctctccgcactgctcacagcccatccatggctcctggatcctgaacctcccatcacatcctcttcgtgacatcactctcccacttcagtccactcctccatcttcaccacttaacccactggtccctctggtcttttccaaatcatttgcaacatgccctgttggttcatacctcagtccttgcacactggggaccctcctcctagaacgccctcctcctgggccttcttctgtctctgtctttgaaaatggagttcaaggattggacttctgggttgagctgagggagagagtgaagcagcagctcatgatctccctcctctaaagccaaacccagggaatgagaaacgtttccaaaggggcacaggatcatctggcaaattaaacaacatgatccaaaaaaatttacctacatgcagcacccgaacgaggaaagggacatctcacaacaatcactttatgcagtagccctgataggaagaaatcaaaggactggaggaagcactaaaacttccctaaatctagactcttgcccatttacggcagcatcaaaaaaccgtaaagtaccaaggaacaattttttaaaaatcatggccgggcacagtgtctcacgcctgtaattccagcactttgggaggccgaggtgggcagatcacgaggtcaggagatcgagaccatcctggctaacatggtgaaaccctgtctctactaaaaatacaaaaattagccgggcgtggtggcgggtgcctgtagtcccagctactcgggaggctgaggcaggagaatggcgtgaacccgggtggtggagcttgcagtgagctgagatcgtgccactgcactccagcctgggagacagagcgagactccgtctcaaaaaaaataaataaataaataaataaataagtaaaaaatcatatccgagctgggcgtggtggctcacgcctgtcatcccaacactttgggaggctgaggagggcaaatcacttcaggtcaggggttcaagaccagcctggccaacatggtgaaaccccatgtctactaaaaatacaaaaattagccaggcgaggtggcgtatgcctgtagtccttgctacttgggaggctgaggcaggagaattgcttgaacccgggaggcggaggttgcagtgagctgagattgtgccattgcactctagcctgggcgacagagcaagagtctgtgtcaaaaaaaaaaaaaaaaaatcctatgctatggtttggatatggtttgtttggccctgccaagcctcctgttgatatttgatgcccagtgttggcggtggggccaaatgggaggtgttcaggtcccgggattggatccctcatgaatggcttggtgctgtcttcaaggtaatgagagagttctcactctgttacttcctgtgagagtttctccaagagctgggtgttaaaaagacattggcacctcccctccccagcccgtgcttcctctcttgccgtattgtctgcacatgcagacttccttttgccttccaccatgagtggaagcttcctgagaccctcaccagaagcaaaggctggtgccaagcattttctatgtggtgcagaactgtgagccaaataaactgtggggggtgcacggcaacatattcaagcttatgtacaaggcatttgaggtcgaggcatggaaaaatactgaggcaccgtgtgcgtgttgtttgtgcatgagattgaaactccttgaccctgaaaacagggcaaggaacggaatgtgtgataaggagcgcggaaagcagcctcctgagactgtagtctgagtgtttttaccaggccatatgtgtctcatgacccgaccgcaaaaggccatctggtggacattttggtttaacaaaccctttcgagaaacacttggcggacggattctggggcggcactctttcagagatgctgctgccgccgcatcccgctcagctggaattgtctgagtgcttcattcttggcgttcactgcagctacaagctgtataaacctcttttctttataaattacccagcctcagatattactctatagcaacacaaatgaactaagataacacggaatgcttctgtactgatgaatatagaacatttttgagagacttaaggaaggcccaaatgaaggaagaaatatatcacgttcatggattagaaggcaaaaatggttaaaatgtcagttgtctgcatattgatttaggtaatccctgtcaaaattcctatatatatataaaatatatgtatatgtgtatatgtatgtacataagtatagatgagtgtatatgtatgtatattgtaaatataagtttatatatatacatatatagttataaattgataagttggttctgaaatttatataaacacataaaaacctagaataaccaaatcattgtgataagaaacacatttagagaaggcagactttaacactagagtaatacagagagtgtggtgtggactagagtacagtctacaaatggacccacacatatacagtcaactgaatagcatcaagtctattcaattgggacaggaaagacttttaataaatgttggtaggtggtcgggcgcggtggctcacacctgtaatcccagcactttgggaggctgaggtgggtggatcacttgaggtcaggagttcaagaccagcctggataacatggtgaaacaccatctctaccaaaaatacaaaaaaaaaaaaaaaaaattagctgggtgtggtggcaggcaactgtaatcccaggtactagggaggctgaagcagaattgcttgaacccaggaggcagaggttgcagtgagccaagattgtgccactgtactccagcctggcgacagagtgagaccccatcttgaaaataaataaataaataaaaaataaatgttagcggaacaagtgaaattagggttggtaaaaacgagtgttgagctgtttctcacatcacacgcaaaaaattagcctgaagcgaatcataaacctaaaagtaaaagcggagactataatgtttgtacaactgtgctgtttgatatggtaaccactagccacatgtggctactgagcacttgaaatgtcctacatttagtgagaaaataatataaaaatctaagtaattaatatttaaaattgattacatgtttccatgtaacggcataatactcatcaatatataataacaatatataatacatgcaatagcttgaataaattttgaaaacatcttgagtcaaagaagccagatgcaaaagaatacatgctctgtagtttcacttatatgaagttcaagaacaggccaaactaatctacaaagacagaaattcataacagtgactgcctcaggttgggagtgggatttggggattaacgtgaatggcacacaggggaactttctggggtcctgggaattttatttctttcttttctttttttttttttttttttttttttttgagaaggagtctagctctgttgccgggctggagtgcagtggctcactgcaacctccgcctccagggttcaagcgattctcctgcctcagcctcctgagtagctgggattacaggcacgggccaccatgcccagctaatttttgtatttttaatagagatgaccaccatgttggccaagaccaccatgttggccaggatggtcttgatctcttgaccctgtgatccaaccacctctgcatcccaaagtgctgggattacaggcgtgagccactgcgcccagccagtcctaggaatagtctatgtcttaactgggatagtaattatgtggttatgaatcaaaacacattgaatcacgcaaataaaatctatgtattttactgtatgtaaatttacctttcatgaaagagaaattaaaaactcttaaatgatgaaagcttttggttccctcttttttattagactagctagtgatctatcaatcttatttgttctttcaaagaaccaactttggggtatactgatcttttgtaggaattttcgtatctcaattttattcatttcagctctgattttggttatttgttttattctgctagctttggggttgacttgctcttgtttttctaattcctctaggtgtaatgttaagttgctaatttgggatctttctaactttttgatatgggtattctggtacattgcatctttactttcctggatgctaggaccaaactggactagagtaaattacgtggttccttctgtcccaaagaaagatgtatttttaactcaggagctacatcagccccatctggctacattaagcatcccagtctcctctgcgtctcatgctggactctatgcaaaagggacagccagcgaaagcattattgatatgtcaatattgagatgtgagaatttgatcctgtcattatgttgttagctggttgttatgtagacgtgattgtatagttgcttcataatgtcagtgggttatacacttaaccacttaacaccactttctgtggtgtcatgtaacattctttcacttctgtgtttggcactcacttaaggacctcttataagtcaggtccggtggtaatgaatttttttcagtttttgtttgtctgaaagggattttatttatccttcgtttatgaagcttagtttggcagggtatgaaaatcttggctgaaatttgttttctttaagaatgctgaatataggccccgaatgtctttggcttatatgatttctgctaaaagctcttctgttagcctgatggggttccctttgtacatgacctgcctcttccttttagctgcattgaatattttttctttcatgtgaaccttagaaaatctaatgactctgtgtctgggggatggtaatcttgtacagtatcttcctggggttctctgaatttcctgaatttatatgtcaacctctctagcaaggttggggaaatttttgtggatgatatcctcaaatatgttttataagttgctgcgtctctctttttccaggattccagtgggccgtaggtttggtctctttatataatcccatatttgttggagggttttgtcattttttttaattctttttttaaaaatttttgtctgattgggttgattcagagaactggtctttgagctctgagattcttttctcagcttaatctattctgatgttaatacttccgcttgtattatgaaatttttgcagtttttcagctctaacagatcagtttgattctctcttaaaatgattattttatctttcagatcttgaatcattttattggatttcctacattccttggactgggtttcgagtttctcctgaatctccgtgatctttgttgccatccagattctgaattctatgtctatcatttcagtcatttcagactcattaagaacattgctggggagatagtgtggtcacttgaaggtaaaatactctggcttttggatgtgtcagatttctttcactggttcttcctcatctgtgtgggctgatgttcctttaatctttgaagttgctgttctttggatagggctctttgcttttatattctctgatgcccttgagggtttcacagtggtataacttgggcttagacaactgcatttgtttctggatgatttcaaggggcccaggctcaactcagcactcctgagctgcatgctctaactacagggacctgggacctggcccatggcttttttttttttttttcctggcccttcaaggttaagcacctcctatgctggaatggccaaggtgttccgggtccactggcaacaacgctccaataggggttgctgacaaagcattttggcagggtggccatgggtgatgggagttcctgcacgtggtgtgcatcagctgcagggtggccgtgggtcttgcaaatctgcttgctaatgttatgcctaagatcacgttataaaagactaacttgtgcctcattctctctctcgctgtctcttgctttctcactttgatgaagctggaggccatgttgtgagctacctatggaaaagcccatggtttcataacaaagctgattgagtagcaaatgttattttccaggcaaaaaaattaagtggtaagttcttctgaatatgcaaggcagaaataattccagtgtttcataaactctttcaagtatgaaagacatatcagccggggtgactctggggagttttttgctttctctgttcctcactgagatctacatggaagggaagggaaaaacactcgtctctaaaaacctcccacctctggcacccataagtctgaagttgcacttatgtgaggaactaccactttgcccctacccactggcttcctgttggggttactcttgtttttccaagccagttcttcccacgccgagggaacttatgatgagacagccccaggaaagtgcctgacacgtattccctgggctgccccttcccttccacatgcttcctgagtgagcacgtccaccttgtggctcagctgtgagccctgccctgatgtctcccccactttctgccccttgagcctcttcttggacatggtgcctccatcccccacccccgactcttcagttatcccagtcaggacccaggacttattccagttgcctcctgttttcaaccaccccatgcatgagtcaggggttcctgtaaacttcacttccccaaaaatgtctgccatcatgcccttcctcctccctccattccctgtctcctcccctctatctgcatggccaggcccttttcggtcttgacgattgctccatttcccacccaacatcccggtctgcagcctctcgcctccatgctgtggccctcgcagcacaagccctgaaaaattttcctgcatccagagctgacactgcctcttccctgctcagggccctctctggttccctggaaccctcagtccaagctgttcagctgatcatgtcccagcacctccaatttccccctggaagaccccacacatatttgcagggcccttcatctgcccggctgtctcatggcctgtgctttttcccctccacctgaggtgcccttagccacctgttaatatgaccaactcccccactagtctcagctcagcctctttccctgcggggtctttcagctttttgaactcctggatttgcattcgtgagtatgtgtcacacagtcaggtgtctcctctttctgtttttgtggggttgtgggagagacagcctctcagctccaccctccccgctctcactgttttcctcactcaaccctgaagaccctgagcaatggcacctcgcttcctgtcctggagggtcagtccctgggcctggtctgtgtgactgacagcaactcccccgcctcactgagctggtctcaggagggaagaacactgaatctctcccagctctcagcaactgggatcctggagctgccccagaaagggactggaggtgaaggcgacctcacctgtgaggctcagcacccactgggctcccagcacatttccctgagcctctctgtgcagagggagctgctggacgggtgctggggcaggcagcctggtcaggtgttgggctgtgagaggggcctagacctaggaacaaaacctcaccctcttctccccactcccaggaagtccctctgggtgcagatgtgcgagtgaagatcaggagggctcccagcccctggttctcacctaatcaaggggcgctcatgggcactggtttttccttcacccgtggcctcacctggggctactactccaggtgagcagggctgctcttttctagggaagccgagggattggcccccgagttccagatggggctgagctgtcctgtcccgcctgagttagaattgaagtggccgatgctaatctgaggccggtgttggctctacaggtgtggaggcccccaggggagcagggctgagaggcctgactgagcccctcctgctcaagacagaactcagatgaggacacccagccctgcgggacagatgcaggacatcactgtcagccatggctcagcccttctgaccactgagatgctgcaacttcccctcctgggagggagcgattgggcaaacacttaccctttgctggaaatctcaaggcacagcacgggtgctcacaatctgaatacagaacgaatgaatgaatgaatgaatgaatgaatgaaatgtctttccttatctcatgtgagagacttgacagttctttcactctccaagtaacatcagcttcccctgtcccagcccagtctgtcctgggcagacaagattaattaagtggctcctgggcagacattggtgcaggagacagggcccaggagacctgtgtgatttgggcaattcgctttctatctctgtccattcatgctgctacaacaaaataccataaactggccagtttataaacaacagaaattcatttctcacagttctggaggctgagaagtccaagaccaaggtgccagcaggtttggtgtctggagacagtttgcttcctcatagatggtgccttttccttatgttctcatgtggtggaagggctgtgcaaattcccctgggtctctcagatgaggggactaatcccattagactaatcccagagtcctcatagcctaatcgcctcccaaatcattataccttctaatactatcacatggggattcaaatttcaacaaatgaattttgaggtgacatattcagaccatagcacttgtcactgtggaccttgatgtcttcctctccgaactgtggaagtgggagtagagggcttgtcagctcccctgggtcatatgtggttcacaagttcctcctttctacagattctgtggcttccttaagtctctccttcccatttttttttctgattttaattgcaaactggggactgtgggaaagagatgggccatggtctagcccttctgaggcaggaggagcatagaccaatggggcaggagcatagcaaagagaattaaaagttggataaagggcagaataagtaaaagcagagagcagaagcaaggtgaggggacgggtgagcaagaagcaagaggcagaagttgagcagccaaaacaaaaagtaagatagagaagtgagcaaggacacccgtggccagcaggatctggaccaaaccagtaaggggcagttcttcagagctatgcatgtgcattagagagaaaaagtatccttaacatgaccctgtatgataatcagctcattaaagttcatgcatatggactgcatattatccatgtacttaaaattatgggatgggtcaaagtaactaagcaacatacttaaccatcaaaaaggcaggcactggccaggcgcggtggctcacgcctgtaatcccagcactttgggaggccaaggtgggcggatcacttgaggtcaggaattcaggaccagcctggccaacctggtgaaaccccatctctactaaaaatacaaaaattagccaggcatggtggcgggcgcctgtagtcccagctaccagggaggcagaggcagaagaatcgcttcaacccaaaaggttgaggttgcagtgagccaagattgtgccactgcactcaagcttgggtgacttcgtccccacctcaccaccaccccttccccccgaaaaaaggcagacactggatagagatttggcagccttgggaagcgaagaaaaacaaaaaaacaaacaaacaaacataaaaagacccaaagtaatgctgatctcacctcatagagatcagttcgctctccctctccaagagtgtgatactgtgcttaataaactgctgcttcttgctttgctgtctgtgtgtgtctcatccaattctttgtttaagacaccaagagcctggaactgcatggcaccatccggtaacacttctgcccactgagatactgcaaatatccttatggggagagagtggctgggcaaggaggaggcgcccaggaggcagattggtctgcaggatgagatactagctgcaaatgcagggattggaggtgagggcggggagtggcttcggacgcccaaacccagcatcttcctctctcaatcgttacagccaaatgatctctaggttatggacaattaggggacagtgtgggctgagcagatcaatgcagttgtatggaagaaaacagactgggattttctatgtatacaacatcttcaggaaaacctacgtgaagttagaattttcaaggcagcatgtgccgatgataaaactacatagaacagcaggaagactattatcattaaagtgaggctaggggctccttcaggagggagcgggggcatggccaataggaaaggggaatgtaagggtgaatgaattaataaaatctctttcttcatttcaagggacagacttgacagttcttttgtgttctagttcttcaagggtgcttattttgtgtgaatcactgagttggtttttaggggacacttttatgtacatgtcttgtgtttctccccgctcaaaaaaaactgtttcaagaaaagctggcctggatctaagggggctgcagcttgcaggatttttcccacttcctcccagcccagtcacacagtttaaaataatcttctgttgaagtcaggtgcgtgtttcttctctcagaaaatcgcgcccatcactgagggtggacgccccggggctggtgtctttgctccacgtctcctgttcacctgaacccctaggagcagttcctgcaggagcaaagccccagggccagcagacccctcacactctgcactaaccaggcctcatgagatagcagtggtgaagggaaatgtccttgtgctcagagagctgtgaggatgggaatagtgtctgctcttttcatattgatcctttcccttatgactttcctgtctaccaagccccacaatacaacaatcacagcctcagcttccccggcctcctgcaggctgggctcccctccgtgtccttggcgtgtatcaacaggcgcaatcctcaccttcacagccccatgtccgtctgctcggtcctcctgagactgaacccccgacctaggggagagtgaccccaccctgcctgtgccccccactgaagctcctgtcatggggagctcaaacgtcaggagactcagtgtctccccaccacacagtgactccttggggacagtgtccggctctgctgtgttgacctcattgtgcagaaagggggtgcccacctcgtggctgctgagggagggatgagaggctgcctgttcaccccacctgcacccctgtctctcatggccccgagtcccacttctgagctacgcagacatccacagcctgtgactcaggggtctgggcagatgggagttattttcaccctgcagaaaatatcacctaaagggaaaggcattgagagggaggcaggaggtggggtgggccctgcatggggtgggaatctgggtgagtctgtctcccgctctggcctcagggacccaggagtgaatgtcgggtggtggacggtggatctcccagggctgacccagccctgacagtgtctgtgtgtgaagttcttcttctaaggaggtcactgttttgacctcaccaccgacttcctgtagggcctcttctaagtcttgagcccgcagttcctgagagaagaaccctgaggaacagacgttccctcgcggccctggcacctccaaccccagatatgctgctgctgctgctgctgcccctgctctgggggagggagagggtggaaggacagaagagtaaccggaaggattactcgctgacgatgcagagttccgtgaccgtgcaagagggcatgtgtgtccatgtgcgctgctccttctcctacccagtggacagccagactgactctgacccagttcatggctactggttccgggcagggaatgatataagctggaaggctccagtggccacaaacaacccagcttgggcagtgcaggaggaaactcgggaccgattccacctccttggggacccacagaccaaaaattgcaccctgagcatcagagatgccagaatgagtgatgcggggagatacttctttcgtatggagaaaggaaatataaaatggaattataaatatgaccagctctctgtgaacgtgacaggtaaggcacgggctccaagagaggccaaaggcaaatgtgatgagggctttagggcacggctgagacgggacacatgtcctgggagggggccgggggtgatggactcaggagaggagctggaccagagcctgagcttccccaggaccgcaccttggatgcccctcctgatcctgcaggcccctcccctcaccagccctgacccacaggcctgacatcctcatcctgcctctgacgctggcattgtggcatgtggggccttatgactccttgttttggggcctgtcctaggcatggccggggtttagcaccatcccaggcctctccccaccagatgccagaagcacccactccacccatgcagtgagacaataacaattatctccacacattgttaaacgtcctggggggttaagtcctccccagttgagagccttaggtctacacaaccccgtgactctctcaggccaggccagggaggaagcacttcctggcgcaaaccaagggcagcagaggcacctgagcctggacagggagactcagcacacggcccctccatctctcatgccctgaggtcctcggagatccacatttagatgctcaaaagacaggagggacctccacgatggtccagaggccgggagggcaggacctacgtgtctggtgcaggccctggtgctccagggaagcccggaggtaggaggtgggacacggtctcttctcctccctgggtgggtctctagggtctctgagcttcagggtttccttcactctgtgcagagggaaccagttcctatagcatgtgggtttgtagtttctctttcgtgctgggttgaggtctccagctcctctccagcccctctccagccccctgtgggtcccacagccctgcccctcctctccctcccacttctctgctcacacaaggagcccaggaaccctctgtctcagagatgctgctgcctctcttgtgggcaaatgaagagagggacagtcggggctgggctgagcctcatttccccacagcgtcccaggccccactgtcaagatacaggctggaggtgctggagttggtgatggtgcaggagggctagtgcgtctctgtgccctgcagtgtcctttaaccctattacaactgaactgactctagccctgtccatggatgctggtttaagaaagggatcaatatacaatggaataatccagtggccacaaacatcccaaatggaaaagtgcaggagacacggggccgattccacctccttggggacctgaagaccaacaactgctccctgagcatcagagatgccaggaagggggatttgaggaactactacttccaggtggagagaggacagataagatggaattacaaaacgaagcagctctctgtgaatgtgacagataaggcacaggctccaggagacaccacagggaaaggtcatgggggtggcagcgaaagcctgggatggggcccctgccctgggagagggctgagggtgaagcgagttgggctcagggcagaagctgaaccagagcctgagcttcccccagggctgtaccatggatcctctgtcctgatcctgagtccccctctcttcaccagccttgacccacaggcccaacatccttatccccggtaccctggagtctggctgcttccagaatctgacctgctctgtgccctgggcctgtgagcaggggacgccccctatgatctcctggatggggacctctgtgtcccccctgcacccctccaccacccgctcctcagtgctcaccctcatcccacagccccagcaccacggcaccagcctcacctgtcaggtgaccttgcctggggccggcgtgaccacgaacaggaccatccaactcaatgtgtcctgtgagtgctgagccaggacgccctggtccctgatgagggggggacgtccctgagggcagaggatggggtcagggctcgacactgggtgctgggtcccagaatctgggctggttgtgggatcaggaggacgctggctccgccttccccatttatgcagctcctggggagacagggccagtgtccccagccctcacagtgatgcaggtctccatgtctttctgtcccagaccctcctcagaacttgactgtgactgtcttccaaggagaaggcacaggtaggatggagccccctccctggggctgggggagcagggccttcagctcagggcagggccaggtccctcctcatcctggactcaccctggtgatatgagactcccttgtagttgaacccaggcctcctccccatccttagcctctgtggccacctgagcacctgtcctcttccccccactcccctcagactcttgcacacacaccctcctcagccctgcagccaggacagggggaaatacatatagcaggagcagcctttgggcctcttatcttccatctcctgaatatgccacctaactcgtctttttattttacccaatagttttgagctacgttcttttggatacatgctataatcacgtgggcaaaaattttaaattcacagtaaaatgtgtccccagaatcaaccagggtctgtccaggctgtcctgagccttggtttgtgcacctggaagatctcagaggtggtttgatgtcagcagtgagactgtttgcaccctcttctagggatgtgtgtgattccactgtctgaatagtctctgattttgtggcatctcctaatggaagatcatggcactaattttatcctacggcacgaacactgcaatgaataatgttgtatctactcccacaaggaatatctaagtgtataggataaattcctaaaagcacattttaccagtgtcatatgttctttctgattttgaaagatatggtgaagttgtcctcaaataaaggtgggcaagtttacattcccaacagtgagcggtgaacataagtatgtccctgcaccagcctacatcactctctgttccattccccagtctcattctgtatccttcctccctgtttcaatcactttgtctctttgaacctccaactttttctctacagcatccacagctctggggaacagctcatctctttcagtcctagagggccagtctctgcgcttggtctgtgctgttgacagcaatccccctgccaggctgagctggacctggaggagtctgaccctgtacccctcacagccctcaaaccctctggtactggagctgcaagtgcacctgggggatgaaggggaattcacctgtcgagctcagaactctctgggttcccagcacgtttccctgaacctctccctgcaacaggagtacacaggtgggtaagggaggggctggaggaggagaacacacctgccccaccctcatgggccacccactgcccctgagcttcaagggggagctcagctctggtctgtgctcagctgtgaggcctggaacttccctgcaacccagggcactgctgtcctcttcctgccaggaaaggtgtgtaaggcaggaagaggggaggagtgggtcttggaggggaggagctggggcctggacaggtgtgtttggggagacacgtgccttgctttccagtgcctggactagggtgacacaagcaaggcactcacttctgggcacacgactaaaaaacaaaaaataaaacaactcagcaagcaagtgaaataatattggatgtgattatctttattaaaaactaaaaattattgcaaaataatttgacagtgaatacaaatcaaaatttcaaatacaggcaggctgtgcttaccactctcatgcctcagtgacctcaggagttgtcccttcctcctccctcccattcttgccctttgtttctgggaagggggattagggtacccaagttgggggccttataggaagtgggaggagaagagacccagttcttggagttggatcaccaaaacaattccaatccatcctcaggcaaaatgaggcctgtatcaggagtgttgctgggggcggtcgggggagctggagccacagccctggtcttcctctccttctgtgtcatcttcattgtgtgagcactgaccctagggagggagggagagtcctgggggagggcggactgggagcaggatccctgaagccagagctggaagggactgcatgggtcaagagcttggggcaagaatgagctcacgggtgcgtggcaagaatttcaagagcgcccttgtctgtggggctccacatctgtggtgaaccttgggccccaccacccaggaggcaggagcctctgttttcaacactggggtctctgggactggaccaccctcctcccacctcagttacccctccagcgccccaacaggaaatacagggcaggggttggtctgcccactgcaccccgatctgaccacactgaaaggctctctggtctcttcactcagagtgaggtcctgcaggaagaaatcggcaaggccagcagcggacgtgggagacataggcatgaaggatgcaaacaccatcaggggctcagcctctcaggtgagtgatatgggcgtctccacacccagcatccagctgggacatctcccacaggatggcctccaggatttctctgcttatcatggccaaaattatctcctcatctcctcctccttcccaccatccagcttctcctgcaggattccccatcttgctgactgcatgacagtccctcctacctactttctctcgggccaggcatggaggaggagttatctcctctctgtcctccctttcttctctatagctccacattcaccaaatcttgtccatttttcctccctaagaatggctagcattgctcccacccccaccaatcctaaactctctcaatgctgaggcctgaggatctctgtcttggacttcctcacctccctgcctcttgtgtcccctgccctgatgggaggaatcattcagaagccatcactgatcagtttctttgcatctggacagctgttcccacccccaacactgtctagagcagaagccagaaaatactatctggaaaggccagataggaaatatttttggctttctggcctacacagtctcattgcagctcctcaactctactgatgtagcaggaaatcagccgtagaccatgtgtaaatgattagctggctgtgtgccagtaaaactttatttataaaaacaagctgtgggtagaatttgtcccaagggctctagtttgacaagccctaacctagagaaaaagcccaaacttcataactgcagccctgcacattctcgtctcttaaacatctacctctctagcagggctggaattagtgtgagatgagtgaggtcctggcctagcatgcaaaatttaagaaggtgccaaaaatctcagtaattgtgatagttttaaaaaaaactcttattttaggtttgggggtacatgtgcaggtttgttacatacataaactctggtcagaggggtttgtggtacagattattttgtcacccaggtcctaagcctagtaccccacagttatttttttctgttcctctctctcctcccaccctccaccttcaagtgggccccagtgtctgttgttctcttctttgtgttcatgagttctcatcatttagctctcactgataagtgagaacatgcagtatttggttttctgttcctgtgttcgtttgctaaggataatggcctccagctccatccatgttcccacaaaagacataatctcattcttttttatggctgcacagtattccatggtgtatttgtaccatattttctttatccattctgtcatggatgggcatttaggttaatttcatatatttgctattgtgaatagtactacaatgaacatttgcttgtatgtgtctttatggtagaatgatttttattactctgagtataaaaccagtaatgtgattgctatgtcaaatgatagttctgcttttagctcttcaggaaattaccatactgctttccacagtggttgaactaatttacactcctgccgacagtataagtgttcccttttctctgcagccttgccagcctctgtgattttttttactttttaaaagtagccattctgactggtgtgagatgatatttcattgtggttctgatttgcgtttctctagtgatcagcgataatgagctttttctcatatgtctgttggccaaaaatgtctgttcatgtcctttgctcactttttaatggggttgtttttctcttgtaaatttgtttaagttccttatagatgctggatattagacctttgcctaatgcatagtttgcaagtattttctcccattccggttgtttactctgttgatggtttattttgctgtgcaggagctcttaagtttaattagatcccatttgtcaatttttgcttttgttgtgattgctttggcatctttgtcaggaaatctttgcctgtttatccagaacgatattgcctacattgtcttccagagtttttatagttttgagttttacatttaagtttttaacccatctcgagttgatttttatatgtggtataaggaagcagtcccactcaatcttctgcatgtggctagacagttatcccagcaccatttattgaatcaggagtcctttccccattgcttttttttgtcagctttgttgaagatcaaattgttgtaggtgtgtggctttatttctgggctctctattccgttccattggtctatgtgtctgtttttgtaccactaccatgctgttttggttactgtagacttgtaatatagtttaaatttgggtaacgtgatgcctccaggttttctttttgcttaggattgccttggctatttgggcacttttttggtttcatatgaattttaaaattgttttttctagttctgtgaagaatctcattggtagtttgatagaaatagcattgaatgtataaatttctttgggcagtatggccattttaatgattttgattctttttatccatgagcatagtatgtttttccatttgtgtcacctttgatttatttgagcagtgttttgtaattctcattgtagagttctttcacctccctggttagctgtatttctaaaaattttattctttttgtggcaattgtgaatgggattgtgttcctaatgtgactcttggcttggtagttcctgatgtatagaaatactagtgatttttctatattgattttgtatcctgaaactttgctgaagttatttatcatttaagaagcttttgggctgggactacgaggttttctagatatagaatcatgcatctgcaaagagggatagtttaaattcctctcttcctatttggatgctctttatttctttctcttgcctgattgctctggccagaatttccaatactacgttaaacaggagtggtgagagagggcatccttgtcttgtgctggctttcaaggggaatgctttcagcttttccatattcaatatgatgttggctctgcgttcaccatagatagctcttattattttgagatatgttcctttaatacctagtttactgagagtttttaacacgaagcgatgctgaattttatcaaaagccttttctgcatctattgagataatcatgtgtttttgtctttagttctgtttgtgtggtgaatcacatttattgatttgtgtatgttgaaccaacatgaagccgacttgatcatattggattaaccttctgatgtgctgatggattcagtttgcaagtattttgttgaggatttttgcatcaatgttcatcaaggatattggcccgaagttttcttcttttgttgtgtcttcgccagattttggtatcaggatgatactggcctcatagaatgagttagggaagagtcagtcttcctccgtatttgggaatagtttcagtaggaacagaaggaggctcagatctgacatttattgtgtgattgaagagccttccaggcagagggaggagcaaagcaaggcccaggcacaggaagaggaaaggagaggagccatgggacatctgtgtgattagacagagggaggcaggactgagagcaggaaatgactttggaggagttgagcctatgtgaattgtgtctgactgcacaggctactgtgagcatttggagagttttgagcagaaggacatgatcagacgagattgggtccgttcagggtggtatagctgtagaccagaagaacatgatcaactttcattttcatgggattcctctggccactgtgtgcagaagagaccgtgtgtgtggcaggggaaggagagagcataggaggtagacaggaggctggtgaacatcccaggcagaaggtggtgttggctggaaccaagatagcagcagtggtagacatgactgtctcccagatgaattctgcagtggaacctactgggatttgttaatgaattggaattagaatgtgagccacagaaagggagcaagaattacttccagatttttgccctgagcagtgggaagaatggaggtgccaatcattgaggctgagaagattgcagaagaaatggatttgggaaagaaaaggaggagttcagattgaataggttgagttttgtgtgtctttggacaagaacgcgggggtttgaattataccactggatcaaagactatagtcaggagaaaggagtgggctgggggtacagatttgggagtcattagcctattgatggcatgaagccaacacagtggataagatcacaaggcaaaggtaaagaagaaaagaacccggggctgctctgatatttaaggtcagggagacctgaagcaattggcaaagaggttgccaagaaggtgaggtggacccagaaaagcatgatgtcctatagttgagtcaagaaggccttctgtgtagggaaggtgagcagctgggtcctctgctgctgaaaagtccaggaaggagaagactgcaaggtggacatttagactcagccacttaagtggtagtcacagtgaccttgatagtagcagtgcttagacttggtatgtgtgtgaatattaatttgagtaatcaagagagaatctggcaagcaaaatcactgacagttccatggagcatcttctgcacaggggagcagcagggaagggctgcgatgaaggaggaccctcccaggcagcctctgtcactctctgctgtgtgagtctgtattagtttcctgtggctgctgtgacaaattaccatgcatttcctggcttccaacaacacacatggattaaagttctgaaggtcacaaccccaaaatgggtgtcactgggccaaaatcaaggcattggcaggcagggctggttccttctggaggctccaggggaggatgcaatttctcaccctttctggcttctagaggcacctgcattccttggctcaagtcccttcctctgtttgcaaggcaagtagcctggcatcttccaatctctctaagccctcctcctttcacttgtaaggactcctgtcattccactgggcccacccaaataatccaggataacctccccatgtcaatatccttaacctagctccatctgtaaagtccctttagcaatgtaacgtaacagattcacaggtttcaggggattagggtatggacattttggggagcagttatacttcttatcagaggatataatttctttgactgagttgtcctccccataccaccgaactgtgagcttcctaagagcaggtgccccatccaaatcaaggccctgtaattctctctcacttagcctcttcctgcccatcttataattcacacatagatattcgtttgtttgacagtcatttttgccaaattccctcaattaaaaagtgagtttcaggaggtcagggccaacacctactgtgtccaccacagtccatccagcacccggatcagggcttcacacacagagggccccagcaggactccaggctttggggtcagaaggaagggactggattgggtcccggcataacagggagtttgggtacgctactttcttcatggagttgttgcgggaagttaataagattaataaacaccaaacaagttgctcaataagtgttaaatattgcaggaaagtataaatgaaggagatttctataaaatgaacgtgggatagaggcaggaactcatgaagtttaattctatacagaggaatatatccgaaccaaccaaccgatcaaacaacttgtgactctccctgccttatcctatttccactgctctgctctgactctcttctctctctccattcagggtaacctgactgagtcctgggcagatgataacccccgacaccatggcctggctgcccactcctcaggggaggaaagagagatccagtatgcacccctcagctttcataagggggagcctcaggacctatcaggacaagaagccaccaacaatgagtactcagagatcaagatccccaagtaagaaaatgcagaggctcgggcttgtttgagggttcacgacccctccagcaaaggagtctgaggctgattccagtagaattagcagccctcaatgctgtgcaacaagacatcagaacttattcctcttgtctaactgaaaatgcatgcctgatgaccaaactctccctttccccatccaatcggtccacactccccgccctggcctctggtacccaccattctcctctgtacttctctaaggatgactactttagattccgaatatagtgagattgtaacgtgtttgtctctctgtgcctggcttatttcactcaacataacatcctctaagttcatctgtgttgtttccaatgacagagtaatgtactgaataattcaaaatagctaaaagagaggagtttaaatgttgtcaccaaaaaaaaaaaaaaaagataaaaatttgagctgatggatgtgctaatcatgctgacttgatcgttccatggtgcatcgaggtgcgggagcctcacgggggctgcgttcaggtcgctcaggtactcagggcaggactggaatttaatccctgcctgattctgaggtctcttctctcacccggcacccagcactgagtgaagcaaccactgactgggcaccccttagccataagtttgcagcatctccgttgactccatggcctctggtgaaggaatccgagaacctggacacacaggagctgagaaaggaggcgcctgaaattacagcccagctctgcgcatggcctgccccagcctgcatagctctgatcagcagatagagcttccaatggccatgctgcccatgatttcatccccagggccctggttgggtctgcagacctccgccaggagcccccatctccggaccttggtgtgactgggctgggtccctctcttgctggtcccctccagagggaccctggaccctttccagcctcacaggccctatggagaccccagcccttctccatcaccttctcctcacctgcttgcccctctggtcttgtcctcgggtctgaggacatgcagcctgatttgccctatggggagaaatcagggaagaagtcacatctcaggtccataagaaacacgggagagtcctgggtagagaggtgaaggggcccaacttcctgccaagtccaagcccaagccctccccatgtgggaccctaggaggtagaggagatggtctgcggtcttcacctctccactgagagtcctcaacatcctcatacttttaaagatttccaagggcacaggaggcagacgccattgtgtgggggaaagaggccgggtgaagctgaggaaggagttgacactgttggcgcaattaccaggggtaagtaacaacaatgatggagttaataataataatttatttcacactgttatgtcatgccataagacgtgccatcaactctggaaattaggttagttattattacccctgggggcagggagagcagcttgtttatcttttgttattagaggcccaagaatcaagccaagagcttggtgaaatttgtggggagtagagatttgtcatggtcatggagctatgacaaaatcccgtcccatccctgcatctttctaattcctcatcttggagggagctgaggggaacagttgaggccacaggctgtgggttcggcctgcccgggcttgaatcccacctcttctgtgggttagcactgaagccttaaataaaatactcaaactccatggggcttagttttctcacctgtaaagtggaggtgaggctaatcacattcactttctccatagagagacagtgagggtcaagcaggttagaatggtggtgggcacatggtaagtgcacagctaatgtccaccactcttatcccccttatccccctgtgactcaccctgactctgatctgaggactccagaggattcatagaggaggcatctttggacccagacctgagaggactgggagatttcacccagaggttgtgagcatgtcatggcagggtggaggtggcactcctgagggtgggcactgcctagcagggcatggaggcagggagatgtgcagagcatgagcctggacgggagctgctgcactcacggggggcctggatcctgacgtccatgtacatgatcagctgtgtcacggggttttccacagtgcattggtaagtgcccatctgctaccaggccagactcaagagatacaactttgcatatgagaagtttaggaaggagctgttgtggatccagcagtacttgagatctgggaaagaataggagacacactccatttccacctgggagccgatctcagccgtcacgatgccattgaaggcatcaggattgcccctcagcagcagatagtcaggcccatctgcagagacagggaaggaggcctgaggctgtgtttctgaccctttggggtcctgggtaccacctcatgaggtcctcctccagccaagaggttccccactgtgcaccctgagctgacccctagacctgccccaggcaaggcagctgtgccaacaacaataaccataataagagcacctgccatgatcagggacctactaggggccagccccatggtagccctttacctcgtaataaaatcattggagtaaaagcaaacacatggggcctactgtgtgccagacactgttctaagctctgtgcctgtccccacatttgttgaattcccagaacaactcatgtgattggttccactattgatccattttatagatggaaaacaatgaggctcggaggagaggattaggacttcatgactgcaactgacacagaaggattgagccagtctcagggcctgggggcaaccgccctgagcagctgaagcctctggatcctgggtcttggttccaagcctctgacctgtaaacagctgtatggagatcagaaatccttcacgcttcaaccccagcttccacacaatgggcgccatagcctgtgcattaggaaatctaacacaccactaaagtgtttccagaaggagatgtaaaggtgattttagaagtgtgattatttttttcaggtgaaagatgtggaagagtttgataaactctgtgaacacacctggaacactggaagaatctaagtgttgatgtatttataagctcagtagattagatttccaagagctgtccgagaatttgtgaggatcttgctgggttgtgaacttgccccagtaggcagctgaagggctataaagaaaaaagaatgtatggaatgtataactgactctttaaatcaaactctctgtttaagggagcacagtctgttcaatttcagtaaaagagagtgacagtgactatagtaagtttacaagaaaagaagaaagaaatcaatgagtggaatttgaagggtcaaggggtttgaacacttaataaactgaacatcaatttaaaaaataattggttttaagtagtcccctatttacacaaaagcagacctcagcaaaggcacactgaccatttctaatctgagaagtgaggactggggtccctatttcacatttgagtgcatcagttctgagtagtgagggcagctcccaagtccacagagctcaagagctggagctgattccaacccagaccaacctggctgcaggctggcccaggatgtctctggcctagtcccatttgcagatccgtggtgagtcccagaggtggacttgtgtggcaaagagctgaaccctgccaaaaagaggcctggcctttgctctcagctactgggagggaacctctaagtccctggaatgtctcacctgattagagtgtctttgtttacctgaaagccttggacttcaccaaatagtctaataatataactaacgataggactttgggtcactggtatcagctctatctgtggagcagctgaaactaaggtcagccatgtagacagttatccacatctatgtgacaaagccacaccaggacatcaaggctcaggtgagtgtccctggttggcaatgctctatgcatgttgtcacatgtcatgtcaggaggaattaccacagtctatgattctactgggaggggacaactggaaactccccattcggaattccctggaccctgccccatgctcttctcaccttggctgactttaatctgtatccttttgctgtaatgagacatcacatgaggataacagctttcagtgagttctgagtcctactagtgaactatcaaaactgaatgtggtcagggactccccaatgtgcagctggcatcagaagtgagggcagtcttgtgaattgctccctaactactcaggactgctggattaaaggctgtgcaggtcgtttgaggatagaaaggattcctggcaacactgcctggtttgaaccaagcactgccacttacttcccatgtgatctcagttaagttgcctccctcccctaagcctctttctacacctgtaaaatgaagatatgaaatgtttcctcttcatagggctgttgtgatgcttaacttcagaagcaagtggagaacgtaaaacgtggaatccttcttagctaggctcttgtgtctgaggtccttattactaaggaaaaagagggaatgaatactgagaagaaaccagcaaccacggccacagagagcatctcatcagctctatttggctgcaccaacatggagcactccttttagacacagcattgtgccaagtccctgcagaaacatgtccctccctccatctagactgtgcacggccagtgatgcctggtctgaacagtcaggatgaatatggcagaagtggcttcattcagacagagtccgtggcatgaccctgactgtctcatgcaatgagaccctcatgaggaccctgctctcaggaggggggtgtaggcttggagggcacctcgaccttcagggactcactttcattctctcaagcaaaccccagaactatacctggcccatctcatccaggatcccccatgactttgagaatcttgtctgaaaccctgtctctccagtcaggagtggtagcacccagtgctcacctaggggcaggaggcagcttcgggagcagccccccaaagcctttaatctctttctggagctcagctttgtaccttcttatcaagagagcaaaacgtcacagttcctcccagggcaaagttttgcctggcacagccagagtggacactaatgaacagtgactccttcctgtctttcaggcttgaagatcacaaggaatgttaacctgggatctttgaggagctatacacaaggtagatttctgacaggtccctacccgcgtccttgcagcgctgtgtgagcaaaccccatcacccccaaatgcatcacaccaccagggggagccatggagttgcacgatgcatcagcactaatctttgtctacaacctcctgggggaagggataagaagtggatagaaaaggtgagaggcaggagccccgaatcagcttccagagaagatggaagtgaaatggagaaataataataatgacattaacaatagcaataacattactaataacattaaataataactacttcctgtagttatcattcctgttcggtgagattgtaaatcttgacataggttagtctctgaatgggtgggagtcaggtgtcaggaagcatttgggggtcaaagagggtggagaagattggtgcagtgatccctgcaactctctgggtgagcagcagggggcgccctaaccatggcagagactgttgagttggttgcacagacataaccaagtgtcatggggcagtgggaagtccatggactctgtctcagaaggagaattacttgatctctgtgtgcctcagtgtccttatctgcaaagtggacatcagagctcctacctttatgagcctgagaacaaaaaccagggagaataaatgaacaaccacagcagcaacaacaaacaaaaacaagagccaaaaccaagtagcgagatgggcctttctatcatctgaccctgaaatccagtcacatttaaaaccaggtctacccctcagatttcccagacaacagaagtcaatgcattttttccctttgaaagtgaaaaacaaacaaacaaacaaaaaacatgctgtaatattggagggaaacaattatggggtttttttgtgttttttttttttttgagatggagtctttgtcgcccaggctggagtgcagtggtgtgatctcggctcactgcaagctctgcctcctgggttcacaccattctgcctcagcctcccgagtagctgggactacaggtgcccgccaccacacccagctaatttttttgtatttttagtagagacggggtttcaccatgttagccaggatggtctcaatctcctgacctcatgatctgcccgccttggcctcccaaagtgctgggattacaggcatgagccaccgtgcccaactacaactatgatttttatatgaacattaattccattatgtggttccttgaggttgcctgatgtacacattgtgggaaaggccatgagagctgctacacagccctttggagatggcgatcatgaagccagcaaatggtcaagggctgtgagtcttcaaaaatctgtcctgataagtgatgatgtcatctccacatgcaaacctgtctccagagaagacacaatcccatccactcaatgctgccgatcctcctaaacaattcaaatgggctttttgcccagcaagaaagggatttttgtatgtacattcatgttctctttcttattcatcagaagttatttttctacgcacctcacattctcaatgataactaagagaaattccttgtttgattaactcacactctataccggaacatttgtgcatctcacaacggttcccttagagcccacctttccttttgagtttaaaccttccttggagtaatcagaataacttccaaataggaaagaatgaaagagactatgtttattcattttgtacactcttaaaacataaattgtatttttgctagctgcagctaagacttttattttaaaatggggcactaactttccttcctcctacattaaaacatttcagaaaaaaacttaaaatcttaaaaataattttaaatactgggataaatttctttaaacataaatttccaatactttctaaaaaaggtcatatctatttcagaactctaatatcaccagaaccccagagaacatcccccaaatttttaggcataaaaattctcttgtttttcagcagacacttgatcagtttacctgcatccataaccttggatatggattcatatgtcagagtctataagctggaacattaaatacaaaattgaaatgatttattttcttctagctgttccaaaaataaagcatacaaaaactttaaagtcacaaatgtaaactattgtcagaacagaatgttaaacattttttcattattagacatcattattaaatacaaataagtgatgaataatatagaaaataatacttattgtttaagaggcatatatgtgtgatggaaataaaaagtctgcattcatttaagttaggttacatttatttgtggacacaaacaggcccacgtatgagaggagagaaaggcagaggaggggagcagaggggaggatggtgcagactgggtgggccctgctggccacacaggaacctggagcctttaggcagagcagagactagactggactttcactctaacagaacccctcggcttccctggacagaacaggcccaagtgggtcatggcagccacatagaaactggaaaggtgcttgctgggtcctccaggaagagggataggggcttgaaccagggaggcaggggtggcgtaaggatatgcttttggatgtgtgtggaaggtcgtgctcacagagttttctaatggatgtggtcagcgaggggaaggcaagaccaaggatgaagccagaatgttcccctgagcacctggagggaaggagcggtgtccatagaggacttcagaggggaggctttcaggggcgataattctgagaatctcccttacatccaaatgggaacagaacagagacagctgaatgcaaatgcctggagttcaggagaggggtccaagctgaagatgtttcaatgcacagctggagtagtgatgaccacagatgaggtaaggaaggggtgaagacaggcagagaggaggacacacatttgtcattggtgctttcatgacaacatatgttatcttcaatctttttgataatagtcaccctaacaggtatgaggtgatgtctcattgtggttttgatttgcatttccctgatgactggtgatgttgatcattttttctctgcctgttgaccatttctgtgtctttggggaactcgccattcaagtccatcatgccttttcaaatcagattatttgttttcttgctgttgaactcaacttgtttgagttccttatatattctgaatattaaccttttaccacatgtgtggtttgcaaatatctcctccctttccataagtagtctgttcactcttttgtgattgtttcttttgccatgcagaaacaaactaaaacaactttttagtttgatgaaattccatttatctattattgcctttgttgcctgtggtttggtggtgttaacttaaacatcacacaattaccaatttggaagaaagagctttatttcttataaaggattacagcctgcaaggtggccatccagacaggctgggaagcagagcctgcagaagaggctcagagacaagcactttaagggagggaggagaaagacaggaatttaagctgaatgggctggccaagtatacatattcaacaggttacagaaggagctttgaatattcatgaaagggttttgacccaagcatattgaacaaacacgcatgttacatgtaatccatgttcaccttagggtagagacttaccatgtaaacgtattacaattaggccctatatgtcaaaaggtctttggaggacacagcagccctcaagcgcgcagcctctgtaaaacctgccataaccagtccatgctccatgttcttatcaagagaaagttactgaaatcagtcttttgtccagtcacaagggtgtggggtcagtgtctgctggtgagctgtatattgttttaatattacttatattgagaccagtgcttgcttagctaccagagaaaaataaacatattgtggcagttagaacatagtttattctctaagtgtgggggtgtgtaatttaacccctgcctggcatggccttaggttttgtatatgatttggtatctcattgccacagagtctgttctgccagtcttatgatctccatttccatattaaggttaatcagttgctgcatctcaactgcaaaaggaaggggctataatgaggtgtgtctgacctctcgtcccattgtagcagcaactcagtttttaagatttttctggggtccccttggccaagagggggtctgttcagttgattacagggcttaggattttatttttagtttacagtatctaaaaaaatctgagcccagataatgtcaagaagctttttctcctgttttcttcaaggagttttacagtttcaggccttacatttccatctttaatccatattgagttgattttgtttacgtctgagataactggcaatggcagctttgatgaacatgtgtgaaagggtgggggacttgattggaagctcgtttggaaaataaccgaagaaaggaaggtaggaagagtgacgacaaacaacctcttgaggagttttgctgcaaatgttacccacccttggaggggtgagttggccctagtgggtcctttctctgccccctgccacttacgccaatagaatgagaccagaatcggcaaagcggagaagaaactttattcattgatcaagaaatggagaaagggagttcatgtgcaaagcaccttctcccaggggttggtaaaaggggatcttaagggcccttagggcaggtagttggagactgaggcgggcagatctggaaaaaggtgggttccttcaggaggggctgaagtgtgcacactcttgtgttttcttttgtacttggcaccttctgtgcctagcaaggcatagttctcgcccctgagtggagattttagtatggtaatgaagcaagaaatcaggtcaaggcctgcactgaggcaggaatccaggtccaggcagcacgtctgggctgaactcatcccctggctggttcctgttgctggctcccagcctttgtttctggcagcaagcagagctgcaagcacaggttagtttcacaggttttggggcttcctgagagaactgaggtcatgttgcagaaacacaaaaaggaacagagaaatggatctggagaagaagaatttttctcagttcttacccacaatctcccagaggtgctcaaattcatagacaaagaaagtagaaagttggttgccatgggttgggggcaggatgggataggaagttatcatttagttggtatagagtttcaatttggcaagatgaagaaatttctggagatcaatgattaataattgcataagagtgtgaatgtacttagtgccacttacctgtgcactgaaaaatggttaaaattgtaattttttaatgtatattttaacacaaattttaaaaagcactaaatatttgatcagcctcctcgccaaataagaaaaactgatggcaaataatcacatgaaagcattctcaacaccatttgctgctacgaaatcacagattagaaccagaatgaggtagcagtacatacctattagaatggctacaaaacaaaacccaaagaaatttttttttaaatccggataataccaaatgttaatgaaaacgtagagcaaccagaactcatatattctgctggtgggaatgtaaaatggtacacccactttggagaacagtttggcaatttcttataaattcgaacttacacatatgaccaagcacccgactcctaggtatttacccaagagaaataaaaaaactagtgtccacacacagaaatctgcatgtgaatatttatactagttttactttacagtcaccaaaacctaaaaacaatatgaatgttcaccagccagtaaatgtatacaaaatggggatctatgaaaacagtgaggtatgagtcagcaatttaaaaacaacaccccatcacatggacgagccccaaatgcattaaaccaagtgaatgaatccagattttaaaggctacattttgaatgattccgtttatatgacattctttaaaaggcatatcagtagggtagagaatagattagtgtttttacaggaattaaatagggagggacagttgcctaccaaggaacatcaggagggaatgttttaagtaatggcacttggtagtgtcttgactgtggttgtgggtatatagctacatacatctgtcaaacctcaaataattgcatatgagaaatactcagttgatgaaattgatggtacctaaattcaaaatacactagagatgacactacgctctcactagaattgttaaaatataaagactgacaataccaagtgttaataaaggtgtacagctaccggaattctggtgcatggctgggagtagtggtaaaagtcaaagccatttggataacgattctgcaattcctacaaaaattaaatatgcaggtattatttgaactaaaaattccacatcttgtgtataaatgagtataaaaacatgtctataaaaagacttctacttggatacctatagaaaaaacctggaaaatcttaaacgtctatcaataggtgagtaaataaaagataatactacttagcaataacacattgtgaactacaggcatatacaacagcttggctcagtttcaaaaaatgattgctgagtgacagaatacagacacaattttttagtatatttctaggaaattctcaagtagacaaactaactcaccatgacagcgggtatattgatgatttcccagcatacgcgatgggaatggtgagctgcaaagaaacatggaaaaccattagagtggaagaagtgttgtgtatcttgactgtggcagtcacagcggggctgcatacacttatcaaaactcactgaaatgaacatttcaggtgtgtgcattttatttcatgtaaattatgcctaataaagttcactaaatacatccagtgaaattcacatcttcatatttaacattctgacccataaatacaatataatttgctttactattaagaccaaattattgcattcctattatgtgctacattcttatttttagaagaacttacaaggtattatgttacttattaaagactcaattccttatatattaagaatgcaaatggctgtctacattagcaaggacaaatgaacatttacctagataatactgttacaaagattttactaatatatggtaccaaatattattatgccctggattttgaggatttgccagatgagatggaaaatcatgtcactgaacctaaaattatttttatctataaacagaatgggccaggacatttagttgtgtgcttgtcaggaaggtgatagctgggtacagtcaaatctgtgccacaggatctaggaaggcagatttccaaatctcacataagagatcagcacgatcacattgtctgagattttttttttttttttttttttttttttttttgagacagaatctagctctgttgcccaggctggagtgcgttggtgtgatctcggctcactgcaagctctgcctcccgggttcatgccattctcctgcctcagcttcctgagtagctgggactacaggtgcccgccaccacacccggctaatttttttgtattttcagtagagacagggtttcactgtgttagccaggatggtctcgatctcctgacctcgtgatccacccgcctcagcctcccaaagtgctggaattacaggcttgagccacagcgcctggcctgtctgagacttctgacaaacaagagggagcaagagggttaggaaacctgtgaaaaactaaattccaacaagacaattaatgcccaaacaagcaactcacgaaagacaaatagtcataaacataaaaactaagcctgaaattttaattttgtctgtatattcccctcatattatcggaaaatattgtctttgggccacatgtaactgtgagaagcacattttttcatgaaaggaaatgctaatctctatgatgaggaccttaaaaaaatcgctcctgcccacactacactgagaggcagcattaaccgaaaaggagtttcttctacactggttcatagaacatgtgtccttctttatgttttacgtgaagatgctgcatggttcttattttggaggtgtcattgaaactgcaaatctgtatactatttatcagggaaaaattctatagtcacatttctttaaaaatacccaatatgctaccatgacacatggcaaactcatcagtgtccgcagctctaaagccagacagtgtgtgtgtgctaaggacatgaggctatggatagggaccatctcaagggtaggggccaggtcagtgctatctcttcttctctccatccccacctacatacagatgctcactatatatttggtgaatgaatgaatggctgtcaccttcactgcacctaggaccactcttcattttttcagtcccagacactcccatagaccctacagaatcctacatcctgcaggatcgactatctcatggctcaagatgaggctgtgactgtctggggccagaagtgaccagttcccagacgtaaacaatggttcacagaaaaacacttcagagtgagagggttttagacacaggtgtcccatgcttcagatgtccccagaggtcctggtccaggctctggcattggacggaagacccgaggtgggaggcaggaagtggtctctgctccttctctgctcccctctgggcaggtctctgaggtcacttggctttgcagtctccctccactctgtgcagaggcggatgacctctgaccacgtgtgggtttgaggttcctcttctgtgaactgccaagatctcatgctcctccccacagccctcttctctgctcacacaggaagcccaggaagcctctgcctcagagatgctgccgctgctgctgccgctgcccctgctgtgggcaggtgagtggccctggggagaggggccgtggggatgagcccatctgaccctcatgtctccacagggccctcgctcaggatgcaagattccggctggagatgccagagtccgtgacggtgcaggagggtctgtgcatctttgtgcactgttcggtcttctacctcgagtatggctggaaagattctacccctgcttatggccactggttccgggaaggggtcagtgtagaccaggagactccagtggccacaaacaactcaactcaaaaagtgcagaaggagacccagggccgattccacctcctcggtgatccctcaaggaacaactgctccctgagcatcagagacgccaggaggagggacaacggttcatacttcttttgggtggcgagaggaagaacaaaatttagttacaaatattccccgctctctgtgtatgtgacaggtaaggcacgggctccaggagtggcacaaggggaaggttatgggggccactgggaagggctcagatgggactcatgtcctggaatggggatgggaataaagcacgtcaggctcaggggaggaactggaccagagcctgagcttcccacagggctgcaccttggatccccctcctgatcctgcgtccccacctctgtccacaacagccctgacccacaggcccgacatcctcatcccggagttcctaaagtctggccatcccagcaacctgacctgctctgtgccctgggtctgtgagcagggaacaccccccatcttctcctggatgtcagctgcccccacctccctgggccccaggaccctccactcctcagtgctcacgatcatcccacggcctcaggaccacggcaccaacctcatctgtcaggtgacgttccccggagctggtgtgaccacggagagaaccatccagctcagtgtctcctgtgagtgatggggccaggatgcctgggtgcctgagggtgtgaatggggagaggaccaggagagaggaggtccaggactggggccacttggtggctgtgtcttggaggccttgctgagtaggggaactagaaggatccaagctgtcaattgccatttctgcgggcttctagaggagcgcctaccttcatctcactcccaccccaactaaatgagaaatcctctcttgctggcttagatcctctaatgaacccagtgattgaagcctccctagaagacggcacaggtaggacagagtccccatctggaggctggaggagcagggccttcagctcagggaagagctgggctcctgcctcatcctgactcaccatggtaaccagagactccttgttggccaactcagggaccctccctatcctcagctcccatggacacctgagcacctgtctgtagggaccagccccacagggtcggtaggtttttctctcatgtttggagacgagggagttgcagaaataaagacacaagacaaagagataaaagacagctgggtccgggggaccactaccatcaggacacggagaccggtagtggccccgaatgcctggctgcgctgttatttattggatacaaagcaaaaggggcatggtaaagagtgtgagtcatctccaatgactgataaggtcacgtgagtcacgtgtccactggacagggggcccttccctgcctggcagccgaggcagagagacagagagagagagacagcttacaccattatttctgcttatcagagaattttagtactttcactaattttgctactgctatctaaaaggcagagtcaggtgtacaagatggaacatgaaggcggactaggagcctgaccattgaagcacagcatcacagggagacggttaggcctccagataactgcaggtgggcctgacatgagtcaggccctccacaagaggtggaggagtagtcttctctaaactcccccagggaaacggagactccctttcctggtctgctaagtagcgggtgtttttccttggcactgacgctaccactagaccacggtctgcttggcaacgggtgtcttcccagatgctggcgttaccgctagaccaaggagccctctagtggccctttctgggcatgacagagggctcacacgtcttctggtcacttctcactatgtcccttcagcacctatctctgtatagcctggtttttcctaggttataattgtagaacgaggattattataatattggaataaggagtaattgctacaaactaatgattaatgatattcatgtataatcatgtctatgatcttgatctagtataactcttgtggttttatatattttattacactggaacagcttgtgccctcagtctcttgcctcggcacctgggtggcttgccacccacacctgtccgcagactcctccacagactcctccaaacacacaccccttggccccacaataaggacagagtgatattcatacagcaggactagcctttgagccccttatcatctacctcctaaatactcctccagcctcaactttaaatttttcccagtagtttaatgtacttctggacaggtgatacaatcgcatgggcaaaaatgctaaatccatagcagagtctgttctcagatgcttgtcctcctccccagaatcaaagagtgttcatcctggctgctctgagccctggtgtattctctggaaggatctcagaggtcgtttggtatcagcagcacagactatcctcactctcagactgtgtagtgttccattgaagagttggatcctaattctgtatatatcttcttgaaatggaatatcatgtttctaccaacagaaacaaaggattgaacagtcttctatctactttgccagtgtatgtctatgtctgtggaatcagttacttaaagcaaaatagctgggtcttacgttctttctgattttgagagatatggccaaattgttctcagtcaatggtggatatgtttacatccccaacagcatggggtgacagtgttttcttttctttttcttttctttttttctttttttttttttgagactctcactctgtcacccaggctggagtgcagtggcgttgtctcagctcactgcaacttccgcctcatgggttcaagcaattctcgtgcctcagcctcccgagtagctggtagactacaggtgcctgccaccacgcccggctaattttttgtattttagtggagatgggtttcaccatgttgcccagggtggtctccaactcctgagctcaggcaatctgtctacctcagccttccaaagtgcttggactacaggcataagccaccgcacccagccgaaagtgtgtcttcatcaacccaatgtggaatgaaagctttcgctttttgccagtattaggtgaaaattgttatctccatataatttttttatttatatgcactttttaattgagataaaattcatataacattaaattcacaatttgaatcattttaaattatatgctaaactggcttttagtcacatattgtacaaccataaccatgatctaatgccaggacattttctttacttcaaaaatccactctgtacccattaagcactcacttcccattatcccctcctctggcaagcactaatctgccttctgtctctacagatttgcctatttcggacatttcatataagtggaatcacacaaaaaacagcctcttgtgtctgatttttttttcacataacggaatgctgtcaaggttcaccccagtactatgcatgaatacttcattctttttgaaacctaatatcccattgtatggagagaccatgttttgctcattcattgttcagttgatagacattagagctgttcacactttttgactgttactaataatgctgccaggaacattcatgtacaactttttgttggaacctatgtttttatttctcttgagcatagccctaggagtgtaatttttaggtcatattgtaactctgtgtttaactttttgaggaaatgccagactgttatccagtgtcagcaccactttacattgcaccagcaatgtacagagttgcaaattctccatattcttttgaacattctcgttttccttttctaaaagaactatggtcttctagtgcatgtgaagtagtaattcattgtggcttcaataggcattaagatactgataaatggtattgaacatattttcatagaccaattgatatttgtatctttttggagaagttttcactcaagttctttgtctactttttaataggttaatttgggttgtttgtaatttgagtggtttgtaaattacatgccctttatatatgctggatactacacccttatcagatctgtgctttacaaatgtattttcccattctgtgggttgtctattcactttcttgatagtgccaatcaatgcaaaatagtttttaattttgataaagtccaaattatgtatcatttcttcttccaactgctggacagtcagggaacagcttagaatgagccctgggctgatgtgataccacatccaaggatgcaggaaggatctgaagaaccaatgtccaagttgtcttgggagaggaaggacatggtttgtggtttagcaggtgaatgggcctcatcccacctttttgcagggaaatcaggaaccgtggaagaggtggttgttttggccgtgggggtagtggctgtgaagatcctgcttctctgcctttgcctcatcatcctcaggtaagcactgcctgaagaccaaggacaggcatggggagggcagaggacatgatgctgaatcccagaatctcaatcctgggggtatgcagacagtttacgtggtcctggggccaggctggaggctgaattggtggtgagaattacacatgggccatttgtggtcagtttgtgtctgtcccaactgagggccaaatgccaggatggggagcttcctgttgtcatcaaggaagtctagacctgctcttcctccctgtgatccctccagcctctagcagggcacaggaagttgagttggctgccctttgctcccttcatgtggccacacttacaggtccttgtctcttcactcaatgtcagtttccacaagaagaaggcggtgagggcagtggaggttgaggagaatgtatatgctgtcatgggttaatctctcaggtgagtgatgtgggcctctcactcttcaacatcctgctggataactcctccacaatggcctccaggattgctctgcccatcatggccaaagttaagccaactgtcttcctcctcaaacctacttttcctgggatgtgggttcttcatcctgcagatgacaaagaggcctcatctctaaagtcagaacctgggtgtgggtctccatcttgacccccctcccttctctagatcccataaattactagctcttgtccctccttctcctaagcagggctcatcttgatgcccttttctccatcctgaccctggtcattcttgcggcctcacctcttccctgatcactgaacccttttcacctcctgcctccatctctccccaacacaggcctccagactgtacttccagatgtctcctcatccagttcctccacagtctgaatggccatgtttcctcttcattgctggagaatgaagtgcaaatgccactgcctggactgaaggcctttcacgatctgtcttctgctggactctgctcctgatcccccttctccttgcatcacccgaagtctccctacacccaccaggccaagccctctgtgattctgagactttgcatgtgtagttacttctcctgaaatggccttcctccccattcctgccaatccaggtccttatcatccttcaggttgtcttaaatgtcatccaggtgtgtgtatttttatgtaatccttgtatgatattaagcggagatgtggcatttgttcattaatttgtagacatattcagtaaccatactgaatacatataatgactatgtgccagcatttccgtatgtgcaagaagttcatcaatagatatagactcaaagagctctgtcatcaagctgttgttctgaagagcagaaggatacaaataaaaagaaataagtaaaatattttttcccatgttggatagagatatttgtttagagaaaaataacacagggaaataagcacagactatactgggaaacagtttctatatctgatagtggaaagaggtgacatttaggcaaagacgtgaaggtgctgaagaggcgggctctgagtctgaataagagaaaagcatcccaggaaaaggataaggggaagagcaagtgcactgctcagaggcagcagcaggcctgggggttgtgggctcaaccagagccccatgtcttagagcagaggaagggtaaggagggagcagcaggaaggaagctgcagactgcgtggggtgctgcagcgcgcacaggagcctggagcctttgggaagggcagagacacaactggactctcactctgacctcaaatgcctgagtcagagcaggcccaagtgggtcatggcagccacaggaagacggggaaggcactgctgggtcctccaggaggagggatgagggctgagccagcgaggcagggtggggtgaggacatgtttttggatgtgtgtggaagatcaagctaataaggatcacaggctaactatgtgttcagtgaggggaaggcaatacaaaggacgaggccggaatgttcccctgggcacctggaaggaaggagctttgtccatagaggactgaagagggaaggactttcctagagaatgattaattctgagaatccacctgacatcagaatgggactaggagggagacagccggatgtaactgtcaggagctcaagagaggggtccagattggagatgttacaatgcacattcaacaacttggttcagtttccaaaaatattactgctgagatgaaagaatacagacacaaatgagtacatttctaggaaattctcatgtggacaaaagtaactcaccatgagagagagcatatcaatggttacccagcacaggaggtgagaatggtgagctgcaaagaggcttagaaaaagcagagtcatgtgggatatgagaactgagcacaggtgggtaggaaatgtaggaaatgaagttggagagagatggaggctacaaatattgcagtgtcctgagtccattatacttatttatgcatttgagcaaaagagtgagatgaaatgacacttactttagtggggtcactcaggctgcagtgtgagaaagtatagatgagaggagaccagattagtggatacagagaatccagtgaagagatgacgcagacatagtcctgggtaaggatgatgaatctcatgtggagaagttgggttctggacacatcttgaagatgaagccaatagtatttgcgaatggagtgacggagtgcacgtagggtaagagcaaagatagctcgtggcctctgcttgataggtgccacagatatcacaggtgagtccacagatatcatagatgtcatggatatccatgaagacatccatgacctcaataatatcatggagagtctgattacacctccatagatgtcacagatgcccacaggtgccaaagatgatgcccatgtggttacccagaatggagacttaaataatttaactgccaacaactaaaattgccaaccctgcaggaggagaatattcttaagtgtagatcaaatattgttttggttactgtaatttggaggtggtcccgagccacccacgtagggattgtaggtagaaggcaggagtctgaagttcaggaaaggggtccaggtgggagatacacaggtttgggagcctccacattaaggtttgatgatggacgaatccacaaagaagagaaggggtccacggacacagccacaggaccctccagcatttagtgtcagggagaagaggtggaaacagcaagaagactgtatagagcagctgctgaggagaaatgagtgaccaggagagtgcaagttcaggtgatggtggccaacgggggctggagtttcaaggagagattggtcatttgtttcaaatgctggtaagtctggtaagatagggtttgagaaacgactatttgaatttagctaagttgtatcacaactggtattgacaaaagcagatctggttgcctggtagaggaagatctcttgactagaaagagttcaagagagaatggaaggagagaaggcagaaaccgtcagtgccaagtactatttggagaaacactgcaccaaatctagaaccaagaaatgggcctgcagcagaatatggtcgtgccctgtagacttgccatttctggcagcatctgctcttgtgtctctcatgatactatgttccctgtttgtgtagggcttttcaccccttgagttaactgcattcccatggcttcccctaccacactgtgagctccacaaggacatggttagatctaattaggcctccatcattctactgtctcctattcagctgcacactgtcaaaatttacaattacctgtatgtttctgtcttcatcccctcaagtactggaagtcacaacccccacccctgctctggtctgctttgctccctcctgaggatccagtgtccagcacataggaggtcccagagatctggggttcagctcaggttcaacagatgtatgacctttgtaagtaccaagtatcaaccaataagtgttaccagtgttgcttaactgagtaagtggagccttaattcagaaacatttgatgaaaaaaaatggaaaagtaaacaaacatcctgtcaggttcaaattttcttaatggactctctctgcttactgtccagccacctccccactgtcctgctctgaacaacttcttttctctccacatggaacatcagaagaggtccaagttacatggcccctctgacctctgaagctcttcaggggctgcccccaccatggggtgaggagctgcattatgcttccctcagctttcatgggatgaatccttccaagggcacctccactgaatactcacaggtcaggacccagtgaggaacccacaagagcatcaggcttagccagaagatccagatcctctataggcagggggccaaaggctgattattggagatttaataccccacaggcaatgggtttatagacattatggaactttcctgctatactaacatcatcttagacttttcaagcaaggagtcctggaatcaaatctgtgctctttcatttgctaagtgtatgatatcatgcaagcttcttaaccttccatgtctccattttgtgctctgtagaatgggtgcaagacgtcctatctcagagatattgtgaggattaaataaagctacacatgaaaaacaccactcctggtgcatagtgacagtttggtgcataacggttccttccccctcgaacagaaggcaatagtgacatttggtccagagtcgtgatggtctcatccctgaaactgtatcagcaacatgtctgtctcactcgatgctcaaaaccccaccagagatgtcttccctgacttgccctccaacatcatctctctctactcctgaatcttttctttccatctcacctgtctgctgtcaaattttctgtctcctttaggtcctgctactggcaaagccagatattagcactttgggaattttctaaaactcagggctgaacacagtcaaaatagttccctagctcctcaacccacaagaatttgaagcttctcaacgtgaaattctaagtaagggatcagcaaacctcatttgtaaaaggccagacagtagatattttcagctttgcaagccataaggtctctgttgcaactattcagctctgccattgtagcaccaaagcagtcacaatctgcaaacgaattgtatggctgtgttctagcaaaatgatatttactaaaacaggcaccccacgggctgtagtgtgctggcctctactctaggttcccctgaatttcactcagtctacttctcaatggcacagcctacactcaagccatgctctgtggaccccattcagatgcatctctccctgtgggtgtgcatccacgtccctcctccatgaaggactgtcaccatgccaccatcaggctaacaccttcttatttttcaaaatgacctcaaaagtggatgtctacatcaagaagatagagggaagcagaagctctaaccaccttcctaaaaagcctaagtgaaataataaaaatcatttttagaaaaccagcagcacccaaaccatgacggggtgaacgcattatgccataagttcataatgacccttaaataaacagatggaagattctggtgttgctttaaaaagccatgatgccaaaacctcactcccttatccctcaaagggacagctgagtcacatgtctttctatgataacggctggctggtgatagggatcaatctgtccgctaaaacattaaaagtttacaattagatttccggtccagacaagatgacatcggcccattttgtccctgctccaaccctctaagcaaaactataaatcctgtagatggttcaagagacaccaaaggagaactctgaagtgtgataagaagaagctgagctggtttaagaccccatgactggaggaacaacacagaggccagggatcttgcatctcccccgacctgagggaggacaccccaactcatcatttcacagcccctgacccagcagcagaaggcagctaggcgagctcctaaggttcatcctctcctgagtggaaggggatcccccgaccaacaacatcaggagagtcccacatcactcaaaaaggggatcagtgtgagccagaaacaagtggccatgaagcgctatcattctccatcaggcctgaggctctcgtttccagcccagagatactgagaccagtgggcagaactggaaaaagagatccagtcataatgtctaatattcctgaccctcggtttgctcctttatcaactgtaaagtctagtctctcactttcagaagtgtgtgtgtgtgtgtgtgacagagagaaagagagagagagagagagagagagagagagagagagagagagagagagactggtataaagcaaggtatttaaagagcagtacagagatcagtaaacaggagcttaccaagcctcctccttccctgtggctcagccaggtggcatggacagacactgtccacaggagggacactacttgtgagttaactggagcagtaggaaaaggggccagagagaagaacccagcaccacccagtcctgattgtctgccacacccctgactccatccatccctctcaagcaggcctggatgcttctcacccctctacccttctgggctaggactaggacgctagcctctgggttcaagaccttctgcagagttgggaagcatctgagctcaaattgtcacacacagtgacagctcccctgcctgggtcttcccaggggccagaatgtctcctagtgggtggaccatcatccctgggagttgtgaggcagaaccttgatcagactccagtgcaaaggtggcaggagcccagggaagggtctggtgacttcctaggttaatgaagctggtcaggggtaactgagaccctccagggtgtgctttcatcctcagacttgggctccttactcgatatgggtattaaccagggattggtgtagttccgggaaaaggatagaatacatgggtatccccagtaattagatgggaataataaagctgatcttgggtatcattggtaggaaagtgttaatcactcaagattcttaggatattttacagctattacaagaccttgggaaacaaagtttccttgtgatgttgcagctgtcctcccactaggcctgaataagtgcaaggctgctacttctctttctccatctgagcagattttcactttttcactctgtgaaaagattttcctctgtgttttctggcatttgcgtctggagccttctgttctctctgtgtgtgtgatctcagacactccaaggctctcacccctgatttctccctagacacttcctgcagtttctgtctaactcaggctgtcctgatccccagagtcatgaagtggcaggaagtctgggccctgttgatagggccctgagacctacagagaagaacttcatgcccttctaacattcccctatgtgtgcctttctgagggctcaggggtgcccatgcaggggcctggcttcctccacacctgtggcctttccaagatctattacaccaggtgatcacaccctccccaaggtaatcccttatctaaccttatgtaagtcccccaaaccctacaacagggctcgccagctggtcctccccagagctagcctttttttttttttttttttttgagatggagtctctgtctgtcgccaggctgcagtgcagtggtgtgatctcagctcactgcaacctcagcctccagagtagctggaactacaggtgcatgccaccatacctggctaatttttctatttttggtagagacggggtttcaccatgttggccaggatggtctcaatctcttgaccttgtgatccacccacttcggcctcccaaagtgctgggattacaggcatgagccaccgcgcccagcccagagccagccttttcaggcatctgacatcactactgtttttttcctggcagggttggagacctccagagaaggaaggtgagaaaaatttgagttcctttctccctcaggacagaggaagatcctggacatgggagcccgaagggaaggtccagacatggagactccatgattattagctcccaaacctctctcttctctcctaacccaccttcacacatcagagaagctctttgctgatttggccctgccatacacagaaaaaccaaagaacttctcttcactctgatatctggcttccaaaactattccctatagttgtgagtaagcaaagcagggagaaggaagacatatgtatttttataatgctttatttaccaaaattaaagaagtactttatgcaagattgtgctacttgtgtgtttacctttctgtagatttggtaagcctgccaatcaacacatatttatcacctactgcgcgcaaagcaagtccacagtgcttttgaaagttgtacgtctttgccttcagggactcactttccatagtgggacctcagtatgcagtgaggaaacttatcctctcacctgctccctgcccacctccaatctgttctccacagggaagacagagtaaattctaaaaatccacttttctgctcccttcagtggcttcccatcacccaaatgggaatagcagaaattcttaagatgagtccaaggtgttacatgcagtatcatatatatgtatacatatatgtatacatatatatgtacatagtatatgtgtgtgtatacatatatatgtacatagtatatgtgtgtgtatacatatatatgtacatagtatatgtgtgtgtatacatatatatgtacatagtatatgtgtgtgtatacatatatatgtacatagtatatgtgtgtgtatacatatatatgtacatagtatatgtgtgtgtatacatatatatgtacatagtatatgtgtgtgtatacatatatatgtacatagtatatgtgtgtgtatacatatatatgtacatagtatacgaggagatggagttggaggttcagtgaagatgtgcaaacctggatttcctcggaccctggagcagagaggatgaggaacgtgtttgaggccaaaggggtcaacgggtgggtgggggtgtgggtgggggtggggggctgcagtcaatcactgactggcttatggatgattgacataaaggctgggttgccagggagcccagtgactcacagcgtgaacccgattacctggtctacacaggcggtaaccgtgtgactagcgactgagtgccttacaggggacgacctcctaagaggctgactggcaggagcccagctaactgctggccagggcaggccgtgggggcgcgttacctgattgtctgaggaactggctggcgcggggactgacgctgactcgcggggcgctgccctggtcacggcctcagctcctcaccggccgcctcactggggcgacggccgctggctgccctcgggctgagcaggtgactggcgtggtggaggcggaggaatgcgcggcgggctcctggtgatctcctgagggtccgcggtcttgcctcgtgactgatccagaatgggccttggaccccacaaggggctcgggggcctcgcgggcctgagggtgacactggcggcctcacgggcctgggctgccccacgctccaaggggtcagctgactgagggacgccctgctctcctggaagcccactttgcgcagtcccgatacaggtcccgcagccgaggactgccggggacgcccacaggccaggcactgctgtgaggccaggaatcctccatcagcgcgcggagaaagcggtgtgaaggctccgctgtcgccctgggcccagcccgcgcgcctcgcacgttgtgcgtctaccccacagccaatcagtggctgcacaggcctctttagtagccaatcagcagcttcaggtgcctattacgcagcagatctgcgaggcagatggagctttcccccacggacacttgcctctgggagctgacgcacagccaatcaggagctgaaagtgcaagtccctccccgcaccttcaggcccagaggaatcctacgggcttgagccaatcagcagccgcgggcggtgccaggaacgtttgggcgccaaatttcttctcagcgagtcctttcctgaccgcgttcttgaaaccacgctcctctccagccagccctgaggactccgttcctcttgattaaatctgctttattttctcacactttacccactgcacactttcgaaacacttcttgctactcaacaatatttttgtggccgccccgctaggatacaggcgcactgcgggcagaattttggccgtttttttctcgccgctgtttcccccacggcctttggctgcgccctgctcgctgctctgggatgaacttgcctttcaggcagccctgcccatctctcacctcccagctcacctgtcccacctgcccgcggatcctcaccctctccgctgggctcccacagccccgtcctccccgctggctcagcccggaccccgccaggctgtgcccgcctctgtctcccctgcccgtggccggtgcccctccaggctccgcctcgcccagcccagacgcccaggcggctccgccccatagatgggaggcaactgcccagggtgcaggggcagcgaggggctgcggctgagagccctgcccggtcctggggagggagggagagtgtgggtggagggggcagccctgcagatgtcagagacagggcggcagcagcacaggtttcctctggtgaggagcccttcccttcccttttctccttccatcctctgagcatcccatgttacaggctgtcccagacccctgtggggctctgcatccaccgcggtccacaccgggctgtgctcacaggaacacatcgaatcctctcgaccactccatggactctcttgccagggccgccttgagaaaggaacacagaccgagtggcttcaacaacgcctttgttttcccacccttctggaggctggaagtctgagaccaagctgtggtcagcgttgcttccttctgaggcctctcggtggcttgcgggtggcatcttctccctgtgtcccacgtggcctttcttctgagcatgtctctgtcctaatcactaatcgctcctttttttttttttttttttttttttttttttttttttttgagacagtgccttgctctgtcgcccaggctggagcacagtggcgcgatctcagctctgtagcctctgtctgttcaagcgattctcctgcctcagcctcccgcgtagctgggatcacaggcatgcgccaccatgtccggctaattttggtatttttagtagagacggggtttccccatgttggccaggctggtctcgaactcctgacttcaggtgatccgcccgcctcggcctcccaaagtgctgggattacaggtgtgagacaccgcaccctgcctgagatgatctcttggggtcacttttatctatatgtcttctgtttcccccaaaaaaatgtttcaagaaaacttacatgggtctaaggaggctccacctcccagggtcccccaccactccctctcagcctgcagccacacagttaaaaatagtcttctgtttaattcaggtgcacgtttcttctccaaaataatcctgcccagcactgagggtgtacgccccaggcctggggtcctcgctccatggctcctgttcacctggactcctgggagcagcacttgcaggagcaaagccctgggtccagcagacgccgcctgctgtggactaaccaggggaagtgtggctgaatgagatgccagcggtgaagaaacccctcctgatgtccaggtaaccacaacgaagggagaagtgtctgcccttttcaaattgacgccttctgtcctgaccctcctttccaagcctcactgaacaacagcctcagtttccccggcctcctgcaggctgggctcccctcagtgtccttggcacgtatcaacacacaaaatcttccacagccccgcatccctctgctcagtcctcctgagactgaaccctcaacctaggggagagcgaccccacctgcctgagccctgcactgaagctcctgtcatgggaagctcagatgtcaggagcctcattgtctccccactgcacagtgactccttggggacagcgtccagctctgccttgttgatctcgtcgtgcagaaagggggtgcccaccttgcagctgctgagggagggaggagaggctgcctgctcacaccgcttgcacccctgtctctcatggccctgagtctcacctttggcaggtctgacctccacaaacagtgatagccacagaggagactcgggggtctggccagatggacccagtttcaccctgcagaggcaagggtgagacagagaggcaggatgtggagatcagtctcggcatggggagggaatctgggtgagtctctcaccctgtctgagttcagggacccaggagtggatgtgggattgtagatgattgatctccaagggcggaccctgacagtgtctgggttgtgaagttcctcctctgaggaggtcactgttccgacctcgcccctgtcttcctgtggggcctcctctaagtcttgagccctcagttcctgagagaagaaccctgaggaacagacgttccctggcagccctggcacctacaaccccagacatgctgctgctgctgcccctgctctgggggagggagggggtggagggacagggacagcaagagaatggttacacactgcaagtgcagagggaggtgagggtgcaggagggcctgtgtgtccacgtgccctcctccttctcccacccccaggttgccttgactaactctccccaagttcatggctactggttccaggaaggggctgacacagcccaggatgctccaatggctacgaacaacccaaaacgaaaagtgaagaaggagacccagggccgattccgtctctctggaaacctgcagatgaacgactgctccctgagcatcggagacgccaggaggaaggaccaggggtcattttctttcgcatggagagaggaagcatgagatggaattacgcgtctaaccagctccacgtgttggtgacgggtaaggcgcaggctccagaagcagcacaagaaaaggtcctggggctgcagctcaggggtgggttgggacccctgtcctgggagggggttgggggtgaagcgtgtcgggctcatgggaggcactggaccagagcctgagcttccccagggctgcacctcagacctcccctcccgatcctgcacccaaccctctcctcaccagccctgacccacaggcccaatatctcctccctggggaccatggagtccggccgcccgggaaacctgacctgctctgtgtcctgggcctgtgagcaggggatacccctaccatctcctggatggggacctccgtgtccttcccgggccgcaccacagcccgctcctcagtgctcaccctcatcccaaagccccaggaccatggcaccaacctcacctgtcaggtgaccctgcctgaggctggtgtgaccttgaccaggactgtccaattcaatgcgtcctgtgagtgctgggccgggatgcctgggtccctggtggggtggggtgttgctgagagcagcaggattggggtcaagggtgctggctcccagaatctgggcttggagtggctggctctactttccccatttacgcggctcctggggagacagggccagtgtccccagccctcacagtgatgtgggtctgcgtgtctttctgtcccagaccctcctcagaacttgactgtggctatcttccaagcagacggcacaggtaggacagagccccctccctggggctgggggagcaaggtctgcagctcagggcagggccaggtcctccgcatcctggactcaccctggtgacctgagacccccttgtgggtgaatccagtgcccctgcccatcctcagcccctgtggccacctgagcccctgttcccatcccgccctcactccccttagaatcctccacacgcaccctccttggccccacagcaagggcagggggacattgatacagcagggccagcctcgagggtcctgatcatcaacctcctgaacacacctctttctctacagcatccacagccttggggaacagctcatccctctcagtcctggagggccagtctctgcgcctggtctgtgctgtcgacagcaatccccctgccaggctgagctggacccaagggagcctgaccctgagcccctcacagtcctcgaaccatgggctgctgaagctgcctcgagtgcacgcgagggatgaaggggaattcacctgccgagctcagaaccctcggggctcccagcacatttccctgagcctctccctgcagaatgagggcacaggtgggtaggggaggggctggaggaggagaacacacctgcgccaccctcatgggccacccactgcccgtgagcttcaagggggagctcagctctggtgtgtgctcagctgtgaggcctagaacttccccacaacccagagcatcactgtcctctccccgccaggaaatgggcgcggggtggggagaggggaggagtgggtcttggaggggaggagctggggcccggccaggtgtatctggggagacaagtgccttgctttgcagtgcttagactaggaagaggcacgtgaagcacttgccttggtaccaaatttaagaaccaaaactaaagcaagagaaataatactgtgacacgataatcatttttaaaaaataaaaattaatgcaaaataattccatggcgaatacaaatcaaaattttaaattaaaaaaaaaactgcacccagcactgtcatgcctcactggcctcaccagaagtccgtaatcctcctccttctgatgcccgctctttgtgtctgggaaagctgggaggagaatcaaagtcgagggccttacaggcagcagaaggtgaggagacccagttattgaaggtaaatcccagagataactccaatccatctgcaggcaccacatggcctgtatcaggagtgatgctgggggtggtcgggggagctggagccacagccctggtcttcctgtccttctgcgtcatcttcatcgtgtgagcattgaccctggggagggagggagacccctgagggagggcaggccaggaacagaatccctgaagccagagctggagggacctgcatggtcaagagcttaaagcaagggcaagaaggaggtcacaggtgcacggtgggaatttcacaagcatctttgttcgtgaggctccaagtctatggcaaacctcaggccccactagccagaaggcaggaacctgtgttctcaacaccggggtccctgggactggttcacccctctctcacctcagtcatccctccagccctttaataggaaacatggtggggcggggggtcggtccacccactacaccttgatcggtacagactgaaagactctggtctcttcactcagagtgaggtcctgcaggaagaaatcagcaaggccagcagcgggcatcagggatatgggcatggaggatgcaaacgctgtcaggggctcagcctatcaggtgagcgatgtgggcatctccatacccagcattcagcctggacacctcccacaggatggcccccaggattgctcagctagtcctggccaaagttgcctcctcacctcctcctcctacctacaagctggcttctcctgcaggattcccccatcttgctgacagcatggcagcccctcctcccagaccaagcatggaggaggattacatcctctctgtcctccctgtcttcctctacagctgaaaattcaccgttatcttgtcaatttgccccacaaagaacagctagcatcacccccgcccaacctgaccctctcattgctgaggcctcaggatcttttccttgggccttgtcacctccctacttctcacctccccttccctatctggagggaccatctggaaggcatcactgcccagttcttctgcatttggacagctgtcctccacccccattgtctagatcagaggccagcaaacattttctgaaataccagatggtaagtatttttagctttgtggactatacagttgctgttgcagctactcaactctgctgctgtagaatgaaatgagccgtagaccatgtgttaatggtgagttggactgtgttccaataaaactttattaacaaaaacaagcaatgggccagatttaatccaagggctgtagtttgccaacccctgacaaagcccaaactcctcagcctggagccctgcacgttctggcctgttaggcacctacctctccaggagggccagagttagggtaagaagagtgaggcacttgctttgaatgcaacatttaaggggatgccaaaaatctcagtaattgagaaaaactaagtttcatgcattgttttttaaaacatcaaaattaaatttaaaaaaaccaatgataagccaatatcaagattttaaataatgacaggttcaataaactgaagtggccgggcgtggtggctcatgcctgtaatcccagcactttgggaggccgaagtgggcggatcacctgaggttaggagttccagaccaacctggaaaaaatggtgaaaccccacctctactaaaaaatacaaaaattagccggacgtagtggcgggtgtctgtaaccccagctactcgggaggttgaggcaggagaattgcttgaacctgggaggcggaggttgcagtgagccgagatcacaccactgcactccagcctgagcaacaagaatgaaactccatctcaaaaaataaaaataaaataaaaaaataaactgaagtgaattaagaattatttaagatcatcacttagtcaagagaaattatcaagtagggcagtgttctcagttgaaaatgagagaatcaaagtcgaatttgaaaatattatttctgccttgcttccagtagagccaggaaagcagattataataaattctgctctaggtatacgtaaaatctttaaacttaaaatgatgttttattatacaccatttttcaatttgtcagtagtagctcaattatttaatgttccggataaaagtgaccattaaacatacatgaaaacatataggccaggcacggtggctcatgcctgtaatcccagcactttgggaggccgagacgggtggatcacgaggtcagaagatcaagaccatccttgctaacactgtgaaaccccgtctctactaaaaatacaaaaaattagccaggcgtggtggcgggcgtctgtagtcccagctactcgggaagctgaggcaggagaatggcgtgaacccgggaggcagagcttgcagtgagccaagatagtgccactgcactccagcctgggcgaaacagcgagactctgtctcaaaaaaaaaaaagaaaaaaaagaaaaaaaagaaaaaatatatatatatatgtatatatatatataaataaagagggacagacatttttctcgtgcctcaggctgcaattggctcagcaaagcacattaaaaatcctggatttctttaaatgtttgttctccatggagttttttggcactaattttgattttaaaatattacatgaggctgggcgcagtggctcacacctgtaatctcagcactttgggaggccaaagtgggcagatcactggaggccaggagttggagacgagcctggttaacatggcaaaaccccatctctactaaaaatgtaaaaattagccaggcgtggtggcacacacccgtaatcccagctactcaagaggctgaggcacgagaatcgcttgaacccgggaggcggaggctgcagtgagccgagatcacgccacggcactccagcctgggtgacagagcaagattctatctcaaaaaaataaaaataaaaataaaagggctatagtctgtaagtggccatctaggcaggcagggaagtgtaacctctggtaaaagttgaaagtcaggtattttgagggaggagggcttggagcaggagttctatgttggatgggttggctaaatatacatatttaacacattataggcagagttttgggtatttatgaaagggtgtcatgcatacgtgtgatggataaatacctaagttatatgcaactcatgtttattttggggtggagacttaatatttaaatgtattataattaagccatctctgtcaagagatgaagcagggactcagaggtatttgagtgtgtagtctcctacacacttggaggagctaatgagattagtaaacaccaaatgaggtgctcagtaagtgttaaatattggaggaaagcatgaaagagaccgacaaaaatgcaggtgggatgaatggaggacggatctcctgggcctccttcctagactctccccgcctcaacctggccccactgctctgttctgactcccttctcgctctctctgttcagggacccctgactgaatcctggacagacggcagccccccgaagcatcctccccccagccatggctgcctcctccttaggagaaggagagctccagcatgcaaccctcagcttccataaggtcaggcctcagaacgcgcagggacaggaggccatggacagtgaatacttggagatcaagatccacaagcgagaaactgcagagactcgggcctgattgggggatcacggtccctccaggcaaaggagaagtcagaagctgattcttctaaaattaacagccctctagagccctatgctgtgcggtaggtcaccagggctccctcctcctgcggaatcgaaacttggaccaacatctcccctttcccaggccacctcggccccgtccctgcccccagcttctgctacccaccactctcctctctatgtttctgaggttgactatttgagattccacatgtaggtgaggtcatacaacatttgcctctctgtgcccggctcatttcaaacaacataacgtcccctaggttcatccgtgttgtctcaaatcacagaatcatgcactgagtattttcaaagagctaagagaggattttaaatgttttcacacaaaagatcgatatttgtgcggatgggtgtgctgatcatgctgacttgatggttccatggtgtatccgggtgtggaaacctcactagggccgtctcaaggctactcggctactcgaggcagggatggaatttaaagcccgcctgattctgaggtctcttctctcatccggtgctgagtcaagcaaccagcaggccgggcacctcttagccataagtttgcaggaaacaatattcctcgagggctttgttttttcctgaagagggggcagcagtagcccagggtctcccggacgtgacaggtgcattgagtgggtgaaggctggggacctctgcgccaaagggatgtcatgtctttatttgttttcctcaaaatttttaacatgtgttttttaaaattgcaggttgtttatttgcttgtttttccttgaaatttgaaactagcattagcttttcagttgaggcaaatttacctaccatgaaagacgcagatctcacatgtgcggttccatgagctccgccaaatgggcacccctgagtcaccggctccccaaagacagagaaactttccatcactccagaaagatcctggggccctgcccagtcagtcctcagccctgagagccaccgcttcctggtttctgcgaccataagttactttccatgtccttgaacttcatgtgattggcatcacccagtatgtattcctgtgtctttttttactcagcgttgcgtgttctgagattcatccacgtcgtgtgtgtcagcatctgttcctctttattgctgagtaggacaccactgaatgggtacatcacagtttgtttacccatttttttttctgttcatggatatttagtctgttttggttttggtgattatgaatatagctgctgtgaacatatttgcgcaagactgtatcgaggtattttcatttctctccagtgtttggggcaggggatgggaacagtggggttggattcccatgcttggcgtgcgagggcatttgggatgtcctgtggagatggcattcagcagctcaggaaggagggaggggctggagatggacacgggaaacatcagggggttccatcatcctgatcatgggcgccggttgttttgggttgaatcttgtcccccaaagagatatgttcaagtcctaacccccagtatctatgtctgtggctttatttggaaatagtctttgcagatgtagccaagttaataggaggtcatactggatgaggtgggccctaagtgccatgactggtgtcccaatgcaatgagggaaattgaacacaagacacacatagggaggaaggccacatgacagcggaagcagagcttggggttttgctgccacagtccccagaagctggaagacgccaggaagaatcctcccagtgccttccgagggagatggccccgctgacactgtgattttggacatttggccttcataatgtcgaagaataaatttctgtggctttaagtcaccaaggttgtgggaatttgatagggaagccctaagaagccaacacacctgacaccaacacacctgctggcacctgctgtgctgcaacctggacccatcctatctccgcaggcctcaaagtgactctcaagagggccggctctacccaggccacagagaagcccgggggagctgctcagcaccatgcaggccagcaagcggaaggtcttccgccaccagcattgagctgcccgaggtattaatatcaggccaccgagacgctgctcttctctcatgcaggtgctatgtttacagtgctaattttgctggaacaacaacaaaaaaatcagttccaaggccctcacacactcaagatttttgaaacaaaattaaaacaggagagcaacaaaggaccacacaggaacggctgttcactggatcaagatgttctgcaatatgcagtgtattcatagtaacccatggggaggaccctgaggcagctctccctcttccctgaaacggtttcttaaaaagtagcttgtttggccgggcgcggtggctcgtgtttgtaatcccagcactttgggaggctgaggcgggcggatcacgagttcaggagtttgagaccagcctggccaacatggtgaaaccctgtctctactaaaaatataaaaattagctgggcatggtggcgcatgcctgtaatcccagctactcaggaggctgaggcaggagaatcgcttgaatccaggaggcggaggttgcagtgagccgagatcctgccactgcactccagcctgggcaacagagcgagactctgtctcaaaaaaaaaaaaaaagaaaaaagaaaaaggccgggcgtggtggcttatgcctgtaatcccagcactttgggaggtcaaggcgggcagatcacaaggtcaagagatcgagactatcctggccaacatgctgaaaccccatctctactaaaaatacaaaaattagctgggcatggtggcgcatgcctgtaatcccagctactcaggaggctgaggcagaagaatcgcttgaacccgggaggcggaggttgcagtgagccgagatcatgccattgcactccagcctgggcgaaagagcaagctctgtctcaaaaaaaaaaaaaaatgcaaagtattcttaaaaatcctaattctgcaggaaagttaatgacgtttggcttcaatacgtggccatgcacctttccttagctgtacaggtgagaactggaaaatctgcaatctgtgactgtacatatatcacactctgcctgctgtaagcaattggtttgtgtaggttccatttgccctgttggtcccaggtgagctgttcattcccttcagaccccaagtaaataagtgaaagtctgttagcaagttccagcctgatgagaggggcctcacactgagaaccccaggcttcctttccagggcattatcggcagttgcctatatcagtagctgaagaagagattcatccaaaggaataaggggaccccgaaaaacagacttcaccctttcccaattgcagcctctgctcccacctgggcttctcacttttccatctctggatctctgtcttgtctgttgcctatcgagtggattcaatggccaaacaactgcagtgaaagtgaaaacagacaaccctcaaggtacaggaagatcagcaggatgacaattattgcaggtaaggattcactgcattcagtccactgtcctcggacacaggagataaactgaaatccacagagaatcagaccgtgggctgaagacggaactgtctacataggaaagagcacagaaaactcagattcttacctcctgcacaactgctcacccacaggctctggtgacccgttttgcaaacacatcttttgcaagtacagaagtggtgggcacgctctggctttgtagctggtgggccagttcaggttcttgacttcactaggcaaaagaattcgagagtgagtccagtgtaaaagtaagcaagacagttaattgcaaagtgaacgtgcactctgacagctggtcagagcggctgctcaaaggtgagacagcactgactgacgctggggaaacttcctttaggggaatcttctgtgattactcatgcgtgggtgggacggtgttgctcttaagcgtgttctgggtggtctgttaggcccgcatgcgcaatggctgtacatgctagtgcatatacatcgctgtctcagcagcaccttaagtctccacgtgagggtgtgttttcactattataatgagcataggtcagcccaaggacactaactaagcatgggtttctgcacttgcacgaatttggggactttcccttctgcccttctacccccttgctgcaagacgttctgaccatgagcccaggatgttctctccatctatttagcaagtttgtttccctttaagagaggctgtgacccgcctgtctaacctatctccttttggtacagcagcacttggagcaggtgtagatcacttctcggggctgcagctgcacactctccgtgtattcttttgtagcctttcctttgggtatcgccctggggtcggtgagcgtggttcccagctaggacaacaggcaaacgccgccaagaggttaagatgaccccattgaccacagagcaccagaagtctttggaaggcagcagcacaacaaacgtcaccacaaagtcctcacagaagaccagaagccacgtcatgacagcgcggatcatgccacagccgttgcaatgacccagaccccatttgccacatcagcctcagagaaagaggaggatgacgaagagtcgttattgtcattttcagtcaggagaggaggatgctcggcaggcacccagagacacctgaccctggccgtgcaagaattctgaggagtgtgtatcaggatctagcgcataatgcttgggtactttagcaccaaatgtgtaagatacactcagaaatgatttctaaacatcacttgaacactttgtgccttttcttcaggatctaaggtgcatgctgtcctgtgtgataggatctgaggcccaggcggggtcggccggcgctgcagctcctccctgcctcctgcagttgccaaggctgggatgcatcatgcagctgcactcacgtctgggccagagtgggcccggggctcaactctgtcccctccatgccactggccagttagagggagatggccaccaagcagacgctggagcccagagcggcatggcccccggaagtgtcacccaatttttaaattactggtcctgttttaagaccagctgctttccccctcaacagggtactcttcccttgtaccattaaatattcctcagcaagtccaatttcaatggctgcagggcatgctggtaaaatcccaaacccaagttcgtataaccagtgtccttgttggagttttacattattcctaaattcactattaggagtataaactaaagttctctgaaaaggattttggaggaaagagactttattccagtgaacagtttgcaaaccagagagactccagtgtaaaatgaagggtgcgctccataaagccaagggaagtgtcaggtttagcgtcctgcccaggctcccaatcaggtctgtttatgcaaatgaaggattgaaactttctgagttctcattggtggacacagctgagctctgattggttggctcaggtgatctctgaaagtccggaagatgaaaatgctgtgggttttcagggaagtcagagtacgtgggtgacctgtacttggctctattttaaactcaggctcagttagccactcaggatccgtcttgaaggagtggctcattcaggttcacatttgttcacaggaataacactgagggttaggatatttgtagttttttatccctcacccccttcctcattctgagtctccaataatgtccattacaccaccctgttgcctttgcacacccatagctgagctcccacttataagtcagaacatgcagtatttgctttttaattcctgaattacttctacacaggggtggacttgtgtagacaggagcccacggagggggagtcgaggtgtgcacagattcgatgatgtgtttcgtactgagaaataacagagagagagaaagagagacagagaaggggaaaggcagcaagagccactcagaaatgttcaattcacagggtatctcaagcagtacttggaaatatatttgccttttgcttttataagaacacatactattttattttgttttactttaagttctggaatacatgtgctaaacgtgcaggtttgttacataggtatacatgtgccatggtgcacctatcaacctgtcatttaggttttaagccccgcatgcattacatatttgtcctaatgccctccctcccctgtcccccatccccctacaggccccagtgtgtgatgttccccaccctgtgtccatgtgttctcattgttcaactcctacatatgagtgagaacaacacacactattttataattgcagaagggatacatttgctacagaaaatttgaaaaatctttaaaaaaaaattataaataggccgggcgcagtggctcacgcctgtaatcccagctctttgggaggccgaggcaggtggatcaggaggtcaggagactgagaccatcctggctaacacagtgaaaccctgtctctactgaaaatataaaaaattagccaagtgtggtggtgggcacctgtagtcccagctactcgggaggctggggcaggaaaatggcatgaacccaggaggtggaggctgcagtgagtggagatcaagccactgcactccagcgtgggtgacagagcaagactccatctcaaaaaaaaaattattttaaacgattactatgtatttatgcctgtatatattttacattttgaaatagataaatattaaatatgtgaaataaatataaaattatttattggcccagcgcggtggctcacacctgtaatcccagcactttgggaggccgaggcaggcggatcacctgaggtcaggacttcaagaccagcctggccaatatggcaaaaccccatctctactaaaaatacaaaaattagccgggcatggtggcgcatgcctgtaatcccagctacttgggaggctgaggcaggagaattgcttgaacctgggaggcagaggttgcagtaagttaagatcgtgccattgcgctccagcctgggtgacagagtgagactgtctcaaaaacaacaacaacaacaacaaaaacaaacaccctaaaagcccaaggatatcaccccaggccaccttgcactgaatgggagcacttagggaagggaaattctttccgcgctggctccaagaacatcgtgttctccgtttgctttacatgaaaacatcttgcatggctcttattttggatgcattcctgaaatttcttgtgtgcacatactagacgtcaaaaaaggcttcataatcgtatttttttaatatttttttttttcagaaggagtctcgttctgtcatcaggctggagtgcagtggtgcgatctcggctcactgcaacctctgtctcccatgttcaagcgattctcctacctgtctcctgagtagctgggattacaggcacgtgccaccatgcccagctaatttttgtagtttttagtagagacggggtttcaccatgttaaccaggctggtctcaaacccctgacctcaagtgatccacccatctcagtctcccagagtgctgggattacaggcgtgagccaccgcacctggtccttaatcgtattttttaatgcccaatgtgctgcttgatgttgtgatgtatactctgggttgtagaggagagaagagtttccctgtactccctgagggttcgataactgactctaggaaataaacggacaacaggcagatcaacaggagaaaaagaatcaagggtcgtggggtcctgggcctggggatttctgcagctttctgcggagggatgagctctgactgtgtgagggtctgaggttcctcttccacgcagggctgagtctcctgctcctccccagcctctgggggtcctgcagcccttcccctccactccattccccttctctgctcacacagggatcccgggaagtcccgcctcagcgatgctgctgctgcccctgctgtgggcagtggggagaggggccgggggagctggacttcactgaccttcattctccacaggggacatggttcaggaggcaatattctggctggaagtgcctgagcccatgcgtctttgtgccctgctccatcttctcctcaaaaaacagctgcaatgattctaccgcagctgtggttactggttctgagatggggcccgtatataccagcacactccagtgtccacaaacaacccagatcacaacattcagggggagacccagggccgattccacctcagtggagacccccggaccaacacctgctccctggacatcacagaagcacagaggcggggatgcagggacgcacttgtacagggtggagagagggcttatgcaagatataattacagtgggaaccagctctctgtgcacgtggggaatcagggcaagaaagaacacactggtatgtactgagggccccctggggcaaggctgggctggtaccccagcttctcaccctgaaagggacccagggagatggggcgctggggagggtttgggggagtccagctgcctcagggagaggctgctcttaggtccacacttaggggtccccacctgcagggcctgggtctctgtctctgtcatctccagccctgatacagacactacatccacatccaggggaccctagaatctggacattccaggaacataacctgtaagaggaagacctccccccgcccactttctcttggatcaatgtggtccccacctccctgggaaagaatcctcactccttggtgctcaccttaccccagggttgcacagcttcacctgagcccttccccagagctggtgcaaccacggagagagccatcccaatcaatctgtcctgaaagcacctggccaggcccctgggtcctggagttcactgggttttgggagaagggggcggagaatctgagttactgggggactcttcttggggacctcttcttggggacctcttcttgggggcctggctggggtcaaagtggagggaacactcagacaccaccccgttgctcaggactgcccgtcacatggcaggtggtcagttactgatttctactccagatgctccacggaacctcagcatttgcatctcagggacggcagcacaggtgggagatgccctcagctctctgaagggggtgggtctctgccagccctgggcagaattgaggtctcaggggtccaataaggggaaggtcatcgagtgtgaccgacgctgcccctcactttcagcccatccagtctcgcttctgccccctccccaggcagagctctccatggtcactgtgacttcctagctgacaacccactgtcaccaccggcgtttcctctcccccatccttccctctcccctcactctcccatgacagcctcctcccggttccctgccacttctctggccatgccatccccgtctcccacaggaaccttatatccagcagttcccacagtggggtcttggcctccagccgctctctgcatgactcctccaggaagctcctccaccctagtggtcccagtcctacctctgccctgaagacccccataaatctctgtctggttcagctggtgctgagcacatcccactcccccttgggaggcccctcccacctgagaagccagagtcaatgtcctgggagtctctttgcacatccctgtatttccccagtacttcccatgagttggtgagttttgcaaacttgacttccggaaactgtctcaactcactcctttcctccatccccacctctggcctcgctcacctggacccgggtgatgcctggacctgcagcagcctccctcctggcctagcagcttctggtcttgctccctccagccgaccacaattcagatcccaaaaaggggtctctctctaaccagatctttccctgtcccttccctactcagctcctcccctggctcctgtggctcctggagaaagcccaagtgtgtcacctgtcttggttcctccaagtggccagaaccacgagggttagcgccctccacagttttgcacatcaaggccggtcgtcctgggacgttctctccatgtcccgatacggccaagtcctccgcatgtttccatgcccctgtcccgggaccattaaggagcctcccgacccctgcatgctgggggtcttcgcccctacttgcccttgcttgtgatgcttgtctcagaaacgcagtttcctctcctgagtctagagggaagacacagggagagaagggcctctcagccctgcccctctggctctctcggtctccctcgtccctcaggtcctaggcaatgcccactcctggtaggggcaggagggcagtccctacacctggtctgtgatgctgatggcagcccccctgccaggctgtgctggtcccagggcagcctgaccatgatcccctcccagctcttgcatccccaggtcctggagctgccccaggtggtttcaggagacgaaggagaattcacctgccgggcataggccctgctgggctcccaccccatctccctgagcctggctgtgcatggggagtgttagcagaacacctgattctaggggtccataggcaggggaagtgtggactcaggaaactcccacctcagtcaccctccagcttttcttatgcctggtaccacctgttactcaccccaaatctctggagaccagtgaggctcctgacctctgaccctcacactgctaaaggaggccctaagtgggggcaggggagtgggtagcgggggatggctttcttttaactcacagcctcacctggatctactgcaccagggaagcaactcttctcaaggtgtcctggaatttgagcccccaaatttggctgacttcacccatcttctccccaaaggaaccctccatagtgctggtctctcctctcagaatggtgtttaccccactggctcagaggatcccaaggggcagtgctactctgggtgactgagcgactgaacttcctcctcacagcagggctgaggtctgggctccagagcccgacaggggtgagggtcctttagaccacgtgttctgagactcatcctgcacagggctggagcaaagagctcctgggtgctccggccccacctcccatgcagaataacctctctccacccctcacctctgttccccatgactcttccttatggctctacaggagcggttgtcaggacaggtgaggaaatagatggatatgctttaccagaatttcaattattttccctgtaataccttgtttctgtcgcttactttaatgtgggtttcatgagctccaaattcattcccataacgtatttttacaaatcccataatatgtttattttacacagtcaatttttaaagagactttttattagaaaaataaactattttatgtttatccacatgtttaccacttcaattgctcttcattactttgtatacaaccgagtttctctatggcattattttcctttggccggaagatctcgtgtatttcttacagtataggtgtgctggcagtgaattcccttgactgtggtttgtctggaaacatttcatatacattcacttaaaaatacttttattgaaatttatatggaattctaggttaacatttttctttccagtaactcaaatggttttggcttgtgtaatttcctatgagaattctgctgtaatttttatcattgcttgtttgtttgtagtttgtggttttctctgactgcttttattattttattttattttatcttattttatttatttatttatttatttgagatggaatctcgctctgtcacccaagctggagtgcagtggcgcaatcttggctcactgcaacctctgcctcctggtttcaagtgattctcctgcctcaacctcctgagtagctgagattatgggtgcatgccaccatgactggctaatttgtgtatttctagtagaaacggggtttcatcatgttggccagggtggactcgaactcctgaccttaagtgatccgcccaccttgacctcccagagtgctgagattacatttttttaaattaatgctaatccttctcaaacttttctgaaaaatagaagaggagaaaatatgccctaacccattctatgaacacagtattacctgataataccaaagacatcacaggaaaatgcaactacagcccgatatcacttatgaatatagatgcaaaaagtcctcgagaaaatgccagcaaactgaatccagcagtgtataaaagactctacagaatactgagtgggatttatcccaggaatacaaaggtggtgtacatacgaaaacctattgatgtaatacagtacattaatagaatgaagaaaacaacatggaatcattttcaattgatgcaggaaaaatatttggcaaaatccaacactcttccatgttaaaacgattagcacacaaggaatagaaaagaacttcctcaatgtgataaaaggcatttgtgaaaaacccaaaggtaacattatattcaatggcgaaagactgaaactctttccctctaagatcaggaaagagacaaaaaatgcctactttaaccagttttattcgacatcgtactggaggttctagttagggcaattacacaggaaaaaaaaaagagaaataactggtatacaagttggaaaggatgagtatttcttatatatagaacattgtaagtatcccactaaactctcttaaagctaataagcaaattaccatatatgccagatacaagattataacacaaaatacagttgtatttctatacgctagcaattaacaatctgaaaagaattaagaacaccacccccatttataataccatcaaaaggaataaaatatttaggaatacatttacccaaggaggtgtaagtcttgtgtactgaaaaataaaaaatattgctgaaagaaaataaagaagacctgaatcaactgaaaaacaccctgtgttcatggattggtagaattaatattaagatggtaatattcctcaaatcaagattcagtgcaatccctatcaaaaccctaatggatgtttttactgacatgaaaaaaaaactatccttaaaattcatatggaatcacaagagacttcaaatagccaaaatgattttgaaagtgaaaacattgtaggactcacatttcctgattttacaacttaccacaaagtcacaggaattaaactgggtaggcacttggtttctcaagccgcctgcttggccctcttccaagtgtactttccttccttcctttctttcctttccttgctttccttactcttctaaagcttttaaataaactttcgctgccataaaataaaataaaaaactaggtggtaccgatactgatcaatggaatagaattgagagccagatataaagtgataaatttatggtccactgataattcagtaaggataccaagaccatttaatgaaaaacgataatgtctttaacaaatggttctggggcaactggagagccacgtgaataaaaatgaagttggactccttccacataaagtatgcagtataggccgagcgcagtggctcatacctgtaatcccaacactttgggaggctgcggcgggtggatcacttgagctcaggaatttgtgaccaggatgggcaacacagcaaaaccctacctctaaaaaaatcacaaaaaattagccaggcatggtggcatgcaccagtagtctcagctactcaagaggctgaggtgggaggatcacttgggcccaggaggtcaaggctgcagtgagctgtgttcattccactgcactccagcctgggtgacaaagtgagatcctgtccccaccagaaaaagaaaaaaagaaaatacacagtatagtaattaactcaaaaaggaccaaagactgaggtgtaagaactaaaattatgaaactcttaggagaaaacatacaagtatatcttcatggccttagatttggaaggtgtttcttagatatgtcaccaaaaacacaagcaacatgagaagaaatagatgaattggacttaaaatttaaaattcttatgcatcgaaggatattatcaagaaagtaaaaagaatgggaccaaatatttgcaaataatatatctaatgagcctagtatccccaaagaagattcgctactcaaccacaaagagacaaaaatcccaactttaaaatggacaaaggtcatgaatagacatttatccaaagaaggtatagaaacgaccaacaaacacacaaaaagatgctcaacattattgtcactatggcaatggaaagcaaaactctacaacgattaagatggctgtaattagtaaaacggaacataacacgtgtcggtgaggatgtggagaaattggaattctcatacactgtatttgggaatgtaaaaggattcagccgctgtggaaaagagtctgcaagttcctcaataggttaaacatagagttattgatatggtttatctatgtccctgtccaaactcatgttaaattgtaatccccaatgttggaggtggggcctggtgggaggtgattggatcgtggaggtggaattttcatagttcagcaccatctccttggtgctgttaagacagtgagtaagttctcatgagatctggttgtttaaaagtgtgtagcacctccttcctcactctctttctcatgctcccgccatgtgagactcctccctcgtgcttcactttatgccatgattggaaacttcctgaggcctccccggaagcagaagtcgccatgcttcccttacagcctgcagaactgtgagccaattaaacctattttcctcacaaattacctagtctcaggtatttctttatagcaatgcaagaacagactaatacagttatcatattgactagcaatttcactccttgggatatacccaaaggaattggaaacagatattcaaatgaaaatctgtacataaattttcatggcagcactactactcacatgagccaaaaagtacaaacaactaaaatgcccagtaactgacaaatggataaatggaatgtggtctttccatgcaatgggatatcactcagtccaaaaaaagaaatgaaataatgatgcatgctacaacaaggattatcctcgtaaacatggatttaccttgaaaacattacccttggtaaaagaagccagacatggaaactcatcaagcttagtaggccatttagagaaaacccacaggtaacattacactcaatgatgaaagactgaaattattccattcacattaaatatccagcatagataaatccatggaaataggtacacgttagtagtttccaggggctctgggaagcaggcaatagaaagtgactgtttccctttcagggtgataaaaatgttcagaaactagatggtggtgatgattacacagcactgtgaatgcaataaatgccactgaattttatactttttcttttttttgagacagagtttcactctgtcacccaggctagagtagaacggtgcgatctcagctcactgcaacctccgcctcctggattcaagcaattctcatgcctccatctcctgagtagctgagattacaggcacccaccactatgcccagctagttttttgtatttttagtagagatggggtttcaccatgttgcccaggctggtcttgaactcctgagctcaggcgatccgtctgccttggcctcccgaaatgctgggattacagacgtgagacaccgggcccagcctgaatgttatactttaaattagcaaatggaagaaattcttttctgattttcaaatattactgaaattttaaagaaacagcagagatgctcagggtgaagcaagtgcttactgtgtgaatccatttataggaagttgtaaaacatgtaaaactagttgatggtgacaaatgtcagaacactggttgcttctcagactgtatgtggaggcagagattaatatggaagggcatgaaggatgctgttttctctggtcaaagaatgacccttatcttgagagggtttcagttgtgtgagtacatgccagtctcgccataggacgtctctgggctcccatgggcatcttgcataaactcaggaactgggttcttctattctctgctgcctcccaccaccctactctcagaagataccttgattctggcttaagaggaaataaacacagtgtagtgatagagaccctttcctgactataaaactattcacctcattgcagctgctaccatccctccttcaacttggttgttccatcttaccttgaaaagtgacttatggaacaacttgtccaaacgtctccactttagagggacaccagtttcctgtgtaattatgttgattgcaatgaaatactcctaagagagggctgacattcctgcttccaatcagaaaatgaggtcattaggcaaacgtccagcagagagagtaattagaaaagatgaaaacatgcattccaatctattctgttcttattatgtttttttttttttttttgagatggagtcttactctgtcacccagttggagtgcagtggcatgatcttggtcacagcgatcttcacctcccaggttcaagcgatcctccttgcctcagcctcctgagtagctgggactacaggcacccaccatcacacctggctaatttttgtatttttagtagagatggggtttcaccatgttggccaggctggcctcgaactcctgacctcaggtgatccacttgccttggcccttcaaaatgctgggattacaggcatgagccactgcgcccagcctatgttcttctggctggactggaggacagtaaggaaacagggcagggctgatgctttccaaacacagtgggacatagtcctcaggtcagcagcgagcaggggatgggaacccacctcatctcactaaccctagctgccatcagtagaacaaaaagtcattaataaaatccaaatcctggaacagcttcaaggaaacaaatgtcaacattgaccaagtcaataaacatgtcagtgtcttctggccagagatcagcaggcaccaggaatagatatgtagttgggttattactcattgcagtgaggaaccacgaaaaccatgaggtgtttcagtaagagagaattataactggcttattataggatttggacttgtgttaggtgatttggggaaactttttaaaaagcagtgtttgcttctttggatgtcaggaagtcagcataattctaacactggatcttcatacatctaataaaaaaggagaaagaactagaccaaagctaccttagtcagtttgggctagaataagagatatcacagaccggctagcttaaaaaacaaacatctaactttgggaggccaaggtgggtggatcacaaggtcaggagatcgagaccatcctggctaacacggtgaaaccccgtctctattaaaaatataaaaaattagccgggcgtggtggcggactcctgtagtcccagctactcgggaggctgaggcaggagaatggtgtgaacccaggaggcggagcttgcagtgagccaagatcgtgccactgcactccagcctgggtgacagaacaagactctgtctcaaaaaacaaacaaacaaacaaaaaacaaacatctatttctcatagttctggaggctggaagaccaaaataaagatgtcagtacaactgggttcttagtgaggtccccgctcctgggtcacagatgactgccttctcactatatcctcacatgggagagagagagctctggtcccttcctcattcttacaagtgccataatcccagcatgggcattccacttccatgagctcacctaaatcccattatctcctaaaggccccacctccaaatatcatcacatcacattaagaattaggacatcaatacatgaattttagggtgacaccaacatttagtctataggaaaggctgtggctgtaattggtaaataatcatcagtctttcctgttaccctagatgggaaatatgtagccattttccaatttggacaacattcttgtttgtgtctgtgttaaggcatgactgtgctgtggtcttattcttgtcttgatccattatgctcaaagaatgtccttgtctggtgttgatgtcctgtgcagtgattgacaacaggacaggagaattgcttgaacacggagacagaagctgcagtgagctgagatggtgccatggcactccagcctgggtgacagagcgagacttcatatatataaatcacgccactgcactccagcctggcaacagagcaaaactccatctcaacagccacaacaacaacaaaagtctataaaaagacttacacctgagtaccattagtgaaaaatggggaaatctcaaatgcctatcaatagatgaataaatataggactatagtatattcatacaatgggatactactgagcaatatcacactgtgaaaactataggcacaaacaacttggttcagtttcaaaaaatatgctgagtgacagaatacagacacagatgagtacattccttcctaggaaattttgaaataggcaaaagcgacacactatgagagagaggatctcagtggttgcctggcacaagaagtgggaatgatgaactgcaaagaggttaggcaaagcccttggtgtagtggaaatgttgtatatcttgattgtgccagtcacaacagggctgtatgcacctgtcaaaattcatgaaaatgaacacttcaagtgggtgcacatcacctcatgtaaattatacctagttaagttcattaaagaaacacagtaagacagattttcttatgtatccttctactccatgaatgtggtatgatattttactgttaaaagtaaatatactgaatattatattatgtgcctatactatcttttaaaataacttacagcaagatattgttttatctattgaggactcacttccttatatttaaaaagaggatggaaatacctctctatggtaggtaggatgaatgaacatttttatagatactactgtgtatagagattttacctgtatatggttgcaaatactgatatgtctcaggcattgaggatctcccaggtgtgtaccacagagagtaaaataaaaaaccatatgagctgaagctaaattttaattttgtctgtacattcaactcatattgtctggaaacattatgtctttgggcctcatttaattatcagaaatgtatttttacatgaaagaaaatgctaatctctatggtaagccccataaaaaaattgctgctgtccccactgcagggaatggcaacactaatggaaaagaaatttcttctggacttgttcacagaagctttcgttttacatgaaaatactacatgtttcttattttagagatgtcgctgaaacattgcaaatcagtgtactaactgccaggggaaaaaatccatagtcatacttcttaaaaatacctcatatgataccatgacatatggcaaagtcaccagcatccacagctgtgaagccaaacagtatttgtgtgtggtgaacatgaggctatggatggggagtatctaaaggggagggaccaggtcagtggcatctcttcttgtctccagcctcattggcacatagatgctcggtatagcttaggtgaatgaatgaatgaatgaattgaatgaatgaatgactgtcaccttcaccacatctaggacccttcttcatttcttctgccccagacacttacatgaaccctacagaaacctatatcctgcaggacgaaccaccccacaggtcaagaagaggccgtgactcgggccaggcctggagtgaccagctgcctggtgtaaacagttgtgcacagaaaagcacctcagagtggaaggactttagacatggggttcgcatgtctcagatggccccgaaggtactgatccaggctctggtgctcctggaaggcaagactcagattctgctccatctcctcccatctctgggcgagtctctggcatctctggcccatgagggtcaatctgtgtggaggggacaagctctgagcacgtgtgggtctgaggttcctcttccatgcagggctgaggtttcctgctcctccccagcttcctgtccggccctgtagtccttcccctccactcccttcctcttctctgctcacacaggaagcccgggaagcctctgcctcagacatgccactgctgctactgctgcccctgctgtgggcaggtgaatggctgcggggagaggggttgtcgggctgggccgagctgaccctcgtttccccacaggggccctggctatggatccaaaaatccggctgcaagtgcaggagtcagtgacggtacaggagggtttgtgcgtcctcgtgccctgcactttctcccatcccataccctactacaacaggaatttctcagttcatggttactggttccgggaaggagccattgtatccagggactctccagtggccacaaacaagctagatcaagaagtacaggaggagactcagggctgattccgcctccttggggatcccagtaagaacaactgctccctgagcatcgtagacgccaggaggagggataatcgttcatacttctttcggatggagagaggaagtaccaaacacagttacaaatctccccagctctctgtgcatgtgacaggtgaggcacaggcttcagaagcagccacaagggaaggtcaaagggacctcaggacagggcttgggatgggacccatgtcctggaagggggttgggaatgaagcctgtcagactcaggggaggacccggaccagaacctgagcttccctcagggctgtacctcagtcaccccttcctgatcctgcatccccgtttcctcaccagccctgacccacaggcccagcatcttcatcccgaggaccctggaatctggccaccccaggaacctgacctgctctgtgccctcggcctgtgagcaggggacgccccccatcttctcctggatgtcagctgcccccatctccctgggccccaggaccctccactcctcagtgctcacgatcatcccatggccccaggaccacggcaccaacctcacctgtcgagtgacgttccccggagctggtgtgaccacggagagaaccatccaactcagtgtctcctgtgagtgctgggccaggacgcctgggtccctgagggtgtgatggggggaggaccaggagagaggaggaccaggactggggccactggtggctgtgtcctagaggcctggctgagtagaagacctaggccacaagccctgtctctctacatttctgtggcttctggggtagggaaggagtgccgcccttatctcaccctcaccccaactgaatgggaaatcctctcttattgtcctagatgctctagggaacctaaagattggtgtctccctaggagaaggcacaggtaggatagaaactccctccttgggaagaggagaccttcagctcagggcaggggtgggcctctcctcatcctgacctcacctcatcctggtgatctgacacccttttgtgggtgaaccaaggccccattcccatcctcagcccccatggccatctgaacacctgtccccatcgccccctcactcccctcagaccccacacacaaccccctcaaccccacaacaagggcagggtgatattcacacacagacccagcctttcagcttccctacattcatcacctgaacacgcctcctgcctcctctttctatttccccctgtagttcagacctaagtgcttctggacaggtgatacagtctcatgggaagaacttaacaatgcacagcggagtctgtccttagatgcccgtcctcctccccagaattgaccagtgtccaccctggctgctctgagccttggtgtgttcacctgaaggatctcagaggtcatttggcagcaacagcatagactgttcttatcctcctgtaggacgcctgtggtattccattgcatgaatagaaattctgtataaatcttctgctcctggaaaagcatggcattgattttgttctaccaacagacacactgcaatgaataatcttgtatctacttcagcaagtgtatgcctatgtatgtgggacctgttcctaaacgcaaaatagctagcttagacgttctttttaatcttgtgaaatatggcaaaatttttctcaatcaagagtgggcaagctgacattcccaaaagtaaggggtcaaggtgcttgttttcgtcaacccagtgtggaaggagaccttttggtttttgccaatgtcaggtgacaattgttgtgtccgtgtagtttttattagataaaaattcacataacattaaattcaccattttaatcattttaaattgtatgataaagtggcttttagaatgctcacaatgttctttaaccatcccactatctaatttcagaacattttaatcactcaaaaaaaacctctaactttttgaagaaataccagactgttgtccacagtgtcagcaccaatgtatgttgcaccaccaatgggtttgggttgcaatttctccatattcttgcaaaaattctcatttttcttttcttttgttttgttttttgtttgtttgtttttgttttgttttttgttttttgagattgaagtcttgctctgtcgtccaggctggagcacggtgacacaatctcagtccactgcaacctccacctccccagtccaagcaattctcgtgcctcagcctcgcaagtagctgagtttacaggcacccaccacaatgcctggctattttttttttttcagtagagatagggtttccccatgttggctaggctgatatcgaactcctgacctcaagtaatctgcctgcctcggcctcccaaattgctgggattacaggcgtgaaccactgcgcccagcctcatttttctttttctttttttttttttccttttttttttttgatatagggtctcgctctgtcgcccaggcttgactgcagtggtgcaatctcacctcactgcaacctccacctcccagattcaagcaattctcctgcctcagcctcctgagtagctggcattacaggcatgtaccaccacgcctggataattttcgtatttttagtagaaacagggtttcaccatgttgtccagcctggtctcaaactcccaacctcaggtgatccacctgcctcggcctcccaaagtgctgggattacaggcatgagccaccatgcctggcctcatttttcttttcctttttttttttttgtttcttttctttcttttttttttttttttagatggagtctcactctgtcacccaggctggagtgcaatggcatgatctcagcttactgcaacctctgcctccaggttcaagcgattctcctgcctcagcctcctgagtagctgggattacaggcacatgccagcatgcccagctattttttgtatttttagtagagacagggtttcaccatgttggtcaggctggtctcgaatttctgacctcgtgatctgcccaccttggcctcccaaagtgctgggattacaggcgtgagccactgtgccaggcctcatttttcttatttaaaagatgtatagcctaatagtgagtgtaaggtacatcattgtagatttaatatgcattaacataatgatgaatgatgttgagcgtattttcatggtcttattgattatttatatcttttggtaaaagttttatttaagtcctttgtccattttttcattggataatttcggttgtttgtaatttgagttgtaagtgctctttatatatgttggatactagacccttaccaaatccatgatttgctaatatatgctcccattttgtgagctatcatttcacttttctgatagtgtcaatcactaaacagaattttaaattttgataaagtccaacttacatatcatttctctacccaaccattggacagtcagggcatggtttatggtaagccctgggctcatgtgatctcacagccagggatgcctgaagggtctggagaaccttccttttcttatgttcaatatggacacagattgtggcttgtcaagtgaatcaacctcatcccacttttttgtagggaaatcaaggcctgtgacaaaggtggttcttgtggccattggggaggcagctgtgaagatcctgcttctctgcctctgcctcaccttcctcaggtgagcactgccccaggggaagtgtgtggagggcaggagacatgatgctgaatcccagaatctcaatcatggagatactcaaataccttaagagcacctaggaccaggcaaggagctcaactggtggtgagaattccacatggttcatttgtagtcaggcctgtgtctgtcccaacccgaggccaaatgccagggtggagaggtttctgttctcataaagaagatcttgagggctaggcctgctctgtctaccacattttctatcagcccctttgcagcgcacagggaggtgagtctgctgccctctgcaccccaatctggccacacttatatgccccgatctcttcactcagtgtgaggtcctgcaggaggaaggtggcaaaggcagcagcagctgtggaggctgaaaacactgccatgggctaatctctcaggtgagtgttgtggacgtctcaccctccaatatcgtgctggatgacttctttctgtggcccccaggatagctgcactcagcatggccaaagttgaacctcccatgtccatccccaaacccacttctctttagccccatctctaaagtcagaaccagcttgtgggtctccaccttgacctccccaccttctccagatctcataaatcacccactcttgtccctctttctcccaaccagggctcatttggtgcccttttctccgtcctgaccttggtcatgcctgggccctcacctcctccctggtcactgaaccatcctcaccttttgcctccctgtctccccagcacaggcctccagactctgcttctagctgcctcctcgtccagtgcctccacagtctgaacagccttgtctccttgtttcctctccattgctggagaacaccaccgtctggactgaaggccttgcacgttctatcctccactggactctcctgatccctcctttctctgtgtcacccaaagtctccccacacccactgggccaagccctctatgactctgagactttgcatgtgtagttccgtttcctgaaatgcccttccctcccattcctgccaagtccaggtcctgattgtccttcaggctcagtcttaaatgtcacccgagtgtgtgtgtgtgtgtgtgtgtgtgtgtgtgtgtgtgtgtgtgtttcttgtatgatattgagggaaggagtgacatttattcattaatctatagattctttggtaactatactgaacacctactatgtgccagcattgttgtaggtgccaggggttcactggtagacatagcatcagaaatctcagtattaagaagatgttctgggctgggcatcgtggctcacacctgtaatcccagcactttgggaggctgaggtagtggatcacctgagatcaggagttcgagaccggcctgaccaacaaggtgaaaccccatctctactaaaaatcaaaaattaggtgggcatggtggcatgtgcctgtagtcccagctactcgggaagctgagacaggagaattgcttgaacctgggaggcagaggttgcagtgcgagactctgtctcagaaaaaaaaaaaaagatattctgaagacaagatggacataaaaaaaggaataagcaatagaaagtatttaactatataggatggcaatatatgtttagagaaaaatcatgcagggaaagaagcataagatatactggggaaccatctctgtacctgatgatgggaagagattatatttgggctaacacatgaaggtggtgaggaagcaggctctgtgtgtatataagcaaaagcatcccaggaagaaggaaaagggggaagagcaaatgcattgctcagaggcagcagtaggcctgggtgttgcaaacacacccagtaacccatgtctaagagcagagggaggcagaggagtcaagcggtggaaaggacactgcagaccacctggtgccctgcaggccacacaggaacctagagcctttgtggagaggagagactcaactggactggatcccttggctccctggcgagagcaggcctgagcgggtcaaggcacctacagacagactgggagagcgctgctggatcctccaggaagaggaatgaggtcttgaaccagacaggcagggttggagtgaggatgtgtttttggatgtatttggaaggtcaagctcacaggattttctaatggatatagtcattgaggggaagggaagagcatggataaagccagaatgttcctctgaacatctcactctttcgaaactccaatgtcttttttgtttttgttttgttgttgttgttgttttgttttttttttttcttgagacggagtcactctgttgcccgggcttgagtgcgatggtgtgatcttggctcactgcaacctctgcttcccaggttcaagctattctcctgcctcagcctcccgagcagctaggattacaggcgcttgccaccacacccagctaatttttgttgttgttgtatttttagtggagacagggtttcaccatgttggtcaggctggtcttgaactcttgacctcaagtcatccaccaatcttggcctcccaaagtgctgagattacaggcatgagctaccactcctggcctccaatgtctattattccacactctatgcccatgtatacacattatttaactacacttatacatgagaacatatgatatttgactttccacttctgaattatttcagttaagataaccttcagttccaaccatgttgcttgaaaagacatgatttcattctttttcatggctgggtagtattccattgtataacccccattttctttatccaatcatccatggataagcattaggttgattccatatctttgctgttgtgaatagtgctgctacaaacatacgagtgcaggtatgtttttgatataataatttcttttcctttacccagtagtgggatcattggatcaaatggtagttctatttttggttatttgagaaatctctctgttttccgtagaggctgtaataatttaccttcccatgaacactgtataagcatttcctgttctccacatcctcaccaacatctgttatttcttgactttttaaaaatagccattctatctggtggaagatgatttctcactgcggttttaatttgcatttatctgatgattagtgatgttgaacctgtttcacatgcttcttggccacttgtatgtcttcttttgaaaactgcctattcatgtcttttgcccactatttaatgggattttttgttttttattattaagctgcttcagtttcttgtacattctggatattagtctcttatcagattcacagtttgcaaatattttcttccattctgtaggttgtctgttcactctgttgattattttttatgctatgcagaagctttttagtttaattacatcctgtttatctattttttgttttgttggatttgctttgagatcttagttgtgaattctttgcctacgccaatgtccagaaaagattttcctaggttttcttcagtatttctatagtttcaggtcttacatctaagtttttaacccatcttgagttaatgtttgtgtatggtgagagataggggtccattgcattattctgcacatggctatccaattctcccagcaccgtttaattaataaggtgtcctgtccccagtgtatgtttttgtcgactttgtcaaaagtcaggtagctgtaagtatatggctttatttctgggttctctattctgtttcattaatctgtgtgtctatttttataccagtaccatgcttttttgtttactatagccttgtggcataatttgaagtcaggtaatgtgatgtctctagctttgttctttttgcttaggactgctttggtaatttgggttctttttgtttctatatgaattttagaattttttttcaaattatgtgaaatatgacattggtattttgataggaattgcattgaatctgtagattgctttgggcagtacggtcattttcaaggtattgattcttctgatccatgagcacgggatgctccatttttccattcatctgtgtcatctacaacttatttcatcagtattttgtggtttgccttgtactgatctttcacctccttggttaaatatattcctaggtatttttctgttgcaattgaaaatgagattgacttcttgatttttcttctgttagattactgttggtgtatagaagtgctactgatttttgtacattgattttgtatcctgaaattttactgaattaatttattaaatctaggagtcttttgaaggagtccttagagttttctagatttaagatcctatcatcagcaaacagagataatttgacttcctcttttccaatgtgggcgccttttgtttctttctcttgcctgattaattgctctagataggactttcagtatcaggttgaatagcaatgaagagagtgatcatccttgtcttgttccagttcttagggggaatgctttcagtttttaccctttcagtatgatgttggctgtgggtttgtcatagatggctcttattattttgagatatgttcctttaatgtctagtttgttgagggtttttaccatgaagagatgttggattttatcaaaagctttttctttgtctagtgggatgattatatggtttttgcttttaattctgtcaatgtgatgaatcacatttattgatttgcatgtacggaaacatccttgcatccctggaataaagcctacttgatcgtgacgaattatctttttgatgtgctgttgaatttggtttgctagtattttgttgaggatttttgcgtctatgttcatcagggatattggactgtaatttacttttctcattgtgtccttgctaggttttgatatcacggtcatactggcttcatagaatgagtcagagaggattccctcctcctgaatattttgggagagttattctttgtacatttggtagaatttgactgtgaaaccatctggtcctggacttctatttgttgagagatttttttctattgctggttcaatctcactacttgttattggtctgttcagcatttctatttcttcctgattcaatcttggcagaatcttatggttctaggaatttatgcatttcctccaggaaaagttcctctccatgttttgaaacaaaagatattattctctcacagttctggaggctagaaatttgaaatcagtaaggccaggcagaaatgaaggtgttggttggactacaacactccagagacttgagaggatccatacctcgcttcttccacattattgtggctggtgtcattccttgaattttggctggactgctcctacttctgtctctggggccacatggcctcgcctccttctgtgtatatcacatctccctctgcttttctcttatcaggactcttgtaggactcttgtgattagatgtaagggttgactgcataatccaggatttccactggtcaagatcattaatttaattaaagttgtaagaatacctataaagtaacaatacaggctcaagaaactaagacccagttttctttgggggtcattattcagattactgagccgctgtgtgatcttctgccccctaggaggcccccatctgccctccagaccttgccttctctttctattactttctctgttctttccgtcctgacacactagtgggccaactcatgtaacgcgtatttatgggaatggggtctattataccataaaagacactgataagacagccaaaagataagttacagggtgataacacctgaatataggtatctgatgaatgacttgtatccagaatatatcaaggactctcaaaacaaaaacataagtaaaccacaacagcaacaacaacaacaaaaggcccaattttgtgtaaatgaaaaagcagccactcaacaataacaaaaaataaacaacacttaaaaatggacagagggtgtgaatcacatttctcaaaaaaatatagtactcaaggccctcaccagaagcaaatgccagcaccacatttcttgcacagcctgcagaactgtgagccaaaatatatctgttttcttcataaattactcagtctcagatattcctctatagcaagccaagaatgaactaacacaatattttaaaaaggtagccaaaggttttatcagccacctcaccagaaaagaaaaacagatggcaaacaggctcatgaaaacatactaaagatcatttgtccttaggtaattataaatcaggagaataagcattcttaggtagcattacatacctgagaacataactagaaaacaaaacaaaaataaaaagaaatgtttaaatattctgataatatcaaatgttaacaaggatgtgaaacaatcagaattcacacataactcctggtgggaatacaaaatggcacatcaactttggagaacagtttgacaatttcttataaatttaaactgaacacttaccataggaccaggcacctgactcctaagtatttacccaagagcaataaaaacttacagttacacacagaaacctgcatgccaatatttataacaacattatttcatagtcacccaaacctgaaaacaatctgaatgctcctcaaatggtaaatgcatacaaaatggggggtccataaaaacagtgagttacgagtcagcaattaaagggaacaaactatagattcatacactcaaccacatgattgaacctcagaggcactgcaccaagtaaatgaagccagactttggaggcaacattttgtatgattccatttatacgacattctgtgaaaaggcaatacagtagggatggaaaacatatcagcattttttcatggactaagtgtggagggagggttgactacccagagacaggaggaaggaacgtttggttaatgacactcttcagtgtcttcacagtggttgtgggtatataattatatacaactctcaaaccatatcaaaattgcatatgataaagagttaattcaactgtatctaactttaaataaattaaaaaatttaaaacactggatgccactatgctctcactagaattgttcaaatataaagcaggacagtatcatacgtcgacaagggtgtggagctactggaattctggcacatggctaggaggagtggtaaaaagtcaaaaccattttggacaacagtttggcaattcctactaaggttaaacttacaagtagtcattagtctgactatttatcttcctgtgtataccaattagtataaaaccatgtatgtaaaaagacttgtacctgaatacctgtagggagaaaactggaaaatccttgtctatcaataggtgagaaataaaacattatagtatacacataaatggaatactacttaacaatatcacattttgaaatacagacacaaacaacgtggttcagtttcaaaaaatattatgctgggtcataggatacagacacaaattaacacatctctaggagattttcaaatagactaactcacaatgaaagaggacatatcagtggttgcccagcatagaaggtgggaagaaaagcccttggcatactagaaatgctgtatatctgcagtgtggtgagtatacaggctgtacatactcgtcaaatctcatgcaaatgtgaacttcaagtaggtgtgctttatttcatgtaaattatacctaattaaattcattaaagaaacacagtaagactcacatattcatatttgatcttctggtccatgaacatagtatgactttattgttaaaactaaatgtggctgggcacagtgcctcatgcccatagtcaaagcactttggaggtcgaggtgggaggattgcttgaacccaggagttcaagatcagcctgggggaacatagcaagaccccatctctcctaaacataaaaacaaaaagttactccggcctggtagtatgagcctgtgatcccagctactagagaggatgacgtgggagagtcacttgagtctgggaggtcaaggctgcagtgaactgtggtcaggccggtgcactccagcctgggcaacaaagcaagaccctgtcttaaaaaaaaaagcactaaatgtattgaattttctattacgtgccacatgctaaatatttaaataacttacaacagatattatttactggagacttaatttgttgtatatcaaatgaggatgcagctacctctctattagtaaggatgaatgaagagttatctagatactattgtgtgtagagatttgacaaaggtatggtggcaagtactaatatgtcccagggatcaacggtttgctggatgcatactacacagagtgatatggaaaaccatgtagctggacctaaagtttaattttctctgtacactccactcatgttgtctggaaatattatgtctttgggccatatttaactgtgagaagcagatttttacatgaaagaaaatgttgatccatatgatgagcctctaaaaaaacttgcttctgcccacactgaaccaaatggcagcatgaatggaaaagaagttttttctgcactggttcatagaacatgtgttctcccttttgtttcacaggaagatgctgcatggttcttgttttggagatgtcattgacactgtgcaaatcagtgtactaggtgccaggggaaaattctatagtcatatttcttttaaaatttccaatatgctaccatgatacatggcaaattcccaacttttcacagctctaaagccagacagcatgtgtgtgtgtggtgaggacatgaggctatggatggggagtatcttaagggcaggaatcaggtcagtggcatctcttctcaagccccacctatacacaaaggctcactgtaagaattaaagaaagaggaaagaaacacgaatggtggctcaccagtcaagacagattttagagaaaacaaacctgagaggagtttctggccgagttaagtcagaggcacactctcttacagactaagagtttttaaggatttagggtgggagagtttatcagagacttggactgcttctgagtctctttgttgtgcttatctgggagagagaggtgtgtgtctgtacccatacatctttctgcagctacaggcatacccactgagtctgcttttagcttccctatcttagtgcacctgaagggaaaggaatttgcttattaaggcccactgttttactagggccattgtatgagggtgaagtttggcagtaactcaagagactctccccctacctccctctgtgcccgagctgtcttatctgtgtttcactgtctgctctttctggttgcttgtagttagcagagaagtgatttccttgaaatgcatgaggctagaaaggaaattggaacttaaagaggcagtgtttctccgagatgacggtgctcctgctctgtcactcactatatctttagtgaatgaatgaataaatgaatggctgccaccttcactttacctaggactcttctttgtttctctgccccagacactcacacggaccctatagaatcctatatcctgctggactaaacaccccatggatctaggtgaggctgcgactcgggccaggccagcagtgatcagccctggtgtaaacagttgtgcacagaaaagcacctcagagtggaaggactttagacatggggttcgcatgtctcagatggccctgaaggtactgatccaggctctggtgctcctggaaggcaagactcagattctgctccatctcctcccatctctgggcgggtctctggcatctctggcccatgagggtcaatctgtgtggaggggacaagctctgagcatgtgtgggtctgaggttcctcttccatgcagggctgaggtctcctgctcctccccagcttcctgtccggccctgtagtccttcccctccactcccttcctcttttctgctcacacaggaagccctggaagctgcttcctcagacatgccgctgctgctactgctgcccctgctgtgggcaggtgagtggctgtggggagaggggttgtcgggctgggccgagctgaccctcgtttccccacaggggccctggctatggatccaaatttctggctgcaagtgcaggagtcagtgacggtacaggagggtttgtgcgtcctcgtgccctgcactttcttccatcccataccctactacgacaagaactccccagttcatggttactggttccgggaaggagccattatatccagggactctccagtggccacaaacaagctagatcaagaagtacaggaggagactcagggcagattccgcctccttggggatcccagtaggaacaactgctccctgagcatcgtagacgccaggaggagggataatggttcatacttctttcggatggagagaggaagtaccaaatacagttacaaatctccccagctctctgtgcatgtgacaggtgaggcacaggcttcagaagtggccgcaagggaagttcatgggtactgcagggcagggctgggatgggaccctggtactgggaggggtttaggggtaaagcctgtcgtgcttagcgggggagcttgaccagaggttgatcttctctcaggccctcacctggaccctccctcctgattctgcatcccctctttctcctcactagacttgacccacaggcccaaaatcctcatccctggcactctagaacccggccactccaaaaacctgacctgctctgtgtcctgggcctgtgagcagggaacacccccgatcttctcctggttgtcagctgcccccacctccctgggccccaggactactcactcctcggtgctcataatcaccccacggccccaggaccacggcaccaacctgacctgtcaggtgaagttcgctggagctggtgtgactacggagagaaccatccagctcaacgtcacctgtaagtgctgggccaggatgctggggtccctgagggtgtaggggagacaggatgggctggtgctggggacatttagtgtcctggaggcctggctgagttcgggagccagaaggacatgagccctgtcccttctgcatttctgtggtttctggcaggagtaaggggaaatgcctacccttatctcatctctacccccaactgaaggaaatcctctcttcctctcctagatgttccacagaacccaacaactggtatctttccaggagatggctcaggtaggaaggagcctccccgcctggggctgttactgacattgagtctgtgtcaggtttggtcagatctggactttcagagtcaaatgttcagaggcaaggcctgcagttagacacgggtagacatcaggcaccttggaaaaggatatttggggatgactagcaacttcccccttgcccatccaaataatgctctttgtctccctcctgtctctgaatgtcttggggtattttatttttaattgatatgtaataatagtacatatttatggatggcatagtgatgtttccatactaataatgtatagtaatcagatcagggtaatagcatatccatcatcttgaacatttattatttcattgttgttgggaacattcaatatcccctttctagctatttgaagctatctattattgttaagcatagtcatcctacagtggtatagaacaccagaacttattcttcctttccaggtgtaatctagtatcctttaacaaatctctctccttatcattgttcccctaaccttcccagcccttattattctctgttctactttttacttctatgaaatcaacttcttgtagcttccacttatgagtgagaacatgtggtattcaactttctgttcctagcttatttcatttaacataatgtcctctagttcaatctatgttatagtgaataacaagatttcattattttttatggctgaatgataatccattgtgtatatacgccacatttcctttatttattcatctgttgttggacacttaggtttatttcatatcttcctattgtggataatgctgcaataaacattgaggtgcagacgtttcttcaatatactgatttcctttcctttctataaatgcccagtagtggggttgctggatcatatggtagttctatttgtagttttttgagaaacttccatactcttctccatagtggttatactagtttacattctggtcaaaagtatataagagttccctcttctctacatcctcaccatcatttgttaattttcatcttttttttatcatagtcctcccaactggggtgatgttacctcattgtggttttgatttgcatttccctggtgattggtgacgttgagcatttttcatatacacttgttggccatctgtatatcttttcttgagaaatgtctactcagataatttgcccatttttaaatgagattgggtttctttgccattgagatgtatgagttcctcgtatgttctggatatgaatcacttgtcagatgaatagctgacaaatattttctcctattctgtaggttgccttttcactctgttggttgtttcctttctgcatagaagctttttagcttgatatcatctcatttatttacttttgcttttgttgcttgtgctagtgaggtcttactcataaaatatttttccagaccaatgtcctaaagcatttcccctatgtttttttctagtattttttaaattttgtgtcttatattcaggtctttgatccattttgaattgatttttgtataggacgagaggtgtgagtctaatgtcattcttctgcatatggcaccagttttcccagcatcatttattaaagaaactgctctttcctcaatgagtgttcttcatgcatttgtcaaaattcagttggctgtagatcgtggattaatttcggtgttctctattatgtattattggtgtatgtatctgcttttatgccaatatcatgctgttttggttactacagctttgtagttttgaaatctttaaatttttgaaattttgaaattttctagttttgaaattttgaaatcttgtagtgtgatacctccagctttgttcttttttgcttgggattgctttgaccattcaggctatttttagttccatatgaattttaagattgtttcctctaattctgtgaagaattacattgatattttgatagagccaggtttgaatctgtagatttctttgggtagtataatcattttagcaatattaattcatctgatgagtaaggaatgtctttccatttgtttgtatcctcttcagtttatttcctcagtgttttgtagtttttcttattaaggcttgtcacctccttggttaaatttattcctaggtatacttcattctcttatagctattgtaaatgtgattgccttcctgatttattttcagctaattcattgtgtgtagaaatgctactgatttttgtatattgattttgcatcctgcaaatttactaaattcatttatcagttctgagagttttattgttagagtctttaggtttttgttttgttttgttttgttttgttttgtttttgagatggaatttcaccatgttggccaagctggtcttgatctcctggcctcaagcaatctgcccactttggcctcctaaagtgctggaattacaggcatgagccaccacgcctggccaagtctttaggtttttgtatgttatttgcagagacaatttgacttccgcctttccagtttggatggtttttatttctttctcttgcctaattgctctggctaggactttcagtactatgtaaaataagagtcataacagtggacatccagttcctagaggaaaagatttcagcttttctccattcagtatgatgttagccatgggtttgtcatatatggccttttttgtgttgaggtactttccttctatacctaatttattgagagtttctatcatgaaacaatattgaattttaacacatgctttttattctgcaactatttaggtgatcatacggtttatgtccttcattctgttgacatatgtataacatttattgatttgcatatgttgaatcattcttgcctttctgggattaatcccactttatcatggtatgttatctttttgatgtattgttggatttgatttgctactattttgttgaatatttttgcatctatgttcatcagggatattggcctctagttttctttttttattgtctcctttctgattttggtgtcatggttatgctggccttgtagaatgagttaggaagagttgcctccacttcaattttttggaatagtttgagaagagttggcataatttttttttctttaaaggttcagtaaagttcagcactgaagccatccagccctggaattttctttgttggggggccttttattattcattcaatctcattacttgttgtttgtctgctgaagttttctataccttcttgattcaatctcggtagattatatgtgtccaggaacttatccatttcttctagactttcaaatttgttggcatattgttcatagtagtgtctaagatcctgtgtatttctgtggtaaccattgtgacatcttcttttttatttatgattttattaatttttatgtcttctgtctctttcttagtttagctaatgattgtcaattttatttatttttccaaaaagcgaacttgttcattgatttttttttaatttcatttatttctgctctgatctttatgatttctttcattgtgctgattttggatttggtttgttcttgctttctagtttcttgaaatgcacagttaaatggtttacttgaaatttgtctaattgtttgatgtaggcatttatttctctcaagttgtctcttaaaactgtttttgctgtgtcccataggttttggtatattttatttctatttttatttattttgagaaatttttaaatatcattcttaatttcttccttcactattggtcatttagaatcattttgtttcatttctgtgtatttgtatagtttgcatgtttcccttggtattgatttttagttttattcaattgtagtcaaataagatacttgatacattttggtttttaaaaatttttggcacttgttttgtgttctaacatatggtcgatccttgggaatgttgcacatgctgatgaaaccatgtgtattctgcagctgtcggttgaaatgttctgtaaatatcttaggttcatttggtatatggtgcagtttaaatccaacgtttatttgttaatcttgtctagatgatttgttcaatgctgagagtggggcgttgaagtcctcaactattattgtattggagtctatctctccctttatatctaataatatttgctttacatatctgggtgctctggtgttgtgtgcatatgtatttacagttgttatattatagtgctgaactgacccctttataataatataatgtccttctttgtctctttacagcttttgacttgtagtccgttttgtctgagataagtatagctattcctgcttcctttcatttccacttgggtagaatatctttttccatctcttccttttcagtctatgtgtgtcttctaggtgagataagtttcttgtaagcagtatatagctgtgttggtagaagggctgaggcagggcttgcttgtctgacataatgtaaaagagtcttggaacatgtcctgggtccagggtctcaaacccctcgtggcctatggaacaccaagctctgtgcctaagggtggaaggctgccctgccacactgcaatctaagcccagggcataaaacccctcgtggcttggaaagaatccagggctctgggcataaaacccctcatagcctctggaatgtgtccagacttgctggccccttgctccttgctctcccaggatcataaattgattgtatcttgagtgaaaagaacttgttctccattatttcaagtagcagagcatatgctaaaccgtcacagctatgcttgatgcaccgctacctttctaccccaaagtcctcacgttctcacttgtctatccccacttctgcacgtcctcaccacctgcttctttgtttgattaccaataaatagtgtgggctcccagagctcggggccttcacagcctccatactagcgtcggccccctggactcactttatgtactattaacttgtcttgtctcattcctttgactccgctggacttcgtggcccccacggcctagtgttggatctgatcaccccaacaagctgagtctagattttcttttcattcattcaggcagtccatatattttaaatgggacaatttaatccatttacatacacattattattaataggttattttcatttcattgattgttttctgattgttttatatattcctggttccttacttcccctcttattgtttctttttgtggttggctgatgttttttttttttttgtagtgataagatttgattcctttctctttcttctttgtgtatgggctgtcagtgagttttaagttcacgtgtttttgccttttcacttccagatgtaagactcccttgagcatttcttttctttttcttctcttatttatttttattattttttttttgagaaagtgtctcactctgtcgcccaggcaggagtgcagtggcatgatcacggctcactatagtctcgacctcctgggcttaagcaatcttcctgccttaacctcccaagtagctgggactacaggcatgtgccaccacgcccagctaatttttgtgtttcttgtagaggtagggtgttgccatttgcctaagctggtctcaaattaaagagctcaagtggtccacctgcctgccttcacctcccaatgtgctgggattataggcatgagccacactgtgcctggccccttgagcatttcttgtaaggccagtctaagagtgattagaattcccttagtttttgcttatctatgaaatattttatttctccttcttttctgaaagatagcttttctgggtatagtatttttgactgttaagttttttatctttcagtactttgagtatgtcatcccattctatcctggcctatataatgttactgctgagaaactcactgttagtctaataaggataatcctatatgtgactagatacttttaccttgctgtttttacaattctttacttgacttttgacaatttggcataatgagctttggagaggacttgcttgggttgaatattttgagagtactttgagcttcctggacctggatgtccttctagttcccaaggcttgggaagttttcacctattactggattaaatatgttttctacaccttttccattctcttctcctcctggaaataccataatgtgaatatttgcttgattgtgtcccatgagtcctgtaggtttccttcgttctattttattctcttatttttacctgcctgtgttatttcagaagatctgtcttcaagttcagaaattattttttcttcttgacctagcctgttgttgaagctctcgattgcggttttttatttcatttattgagttctcagctgtaggagttctgctttgttcttttatataatatctatctctctgttaaatttctctttcaagtcatgaattaaaacaatgggacacaggtgcccaactacttggctgacctgggggcatatctgctggaggtgccaacatggctgttttgcagggctgagatgaagctgaatgactcttggctggcctaggtgtgtttttgccaggagtagcactcagagctttatctagggtttgggatgtgagtgtaagactgctcagctggcctagggggtgtaccagccagtggtagcccatggggctgtttctcaggcctggaatgcaagcacattctgcctggggtcatgtctaaaagggttggctcacaaggctgtttctcaggccctaattgtgggagagtggcctttgggcaggccagagtcatgtccacagaaggcgtctgggcaccgtaaggctgtttctcagagcctgtgtgtgagcacataaccactaccccagcctggggatgtatcaactctttgttggctcagaggtctctcccattcaggtgagcatgcacagtagtttggccaactcaattgtgtgttcgccctgagtgggactataagacctttcctccagctggaagtacgggcagcaggggttggtttctctgctgttcagggccagagtcccagccaatcctgggcccaggctccatgcagctctaattgtggtattcagccactactgcaggtttagtggaatgaagatgcacaatgataaagaggtgcatgccactggcccccagaggagggtgcactccagagatggctgtggtctcaagatggttctgtgttgtagcagcttgcccgcaggggctggttagggagttgggagtgcacaccaaatgctccatgcagctgtgtgaattcctggcagctcttccaactgtgctcagagcttgtgaggactgtaagattaacctgtagtaaggaatgtaggtatctgcagtggcactggaggttggttggattcctctgcttatcatttccctacaaggggaaatccttcctgtctctgggacaaaccaatctgggctggggagatggagctgcaaagcccgggtgcctccatgctgccctcctgggtttccaattaccacaggtaactctccactcccttgctgcactacactactctcccttcgacactccactcaaatctttgctgtggtttattcattgccttggtcctttcttgtctggtgacacgggggaggatgagctccaggcacctccggtgagccattttgctccaatgggggcatttttttttaataggttttatttttcagagtagtttttgtttcacagcaaaattgagtggaatcttctagtcgctgatcatcttgggagcatttataaatgaaccttatttttcatgaagaaattgagcagaagatactaagacttcccgtatgccctctacccttacacatagtttccccggccatcagcatcccccatcagagtggtacatttgttacagtcaataaaactacattgacatatcattgtcacctgaagcccatagtttacattaaagttcactcttggtgttgtacattttacaggctttttaaaaatgtataatgacatgaatccaccatgagagtatcatatagaatagtcacacttccctaaaaatctctttagggcatttttttctactgtccatacctcaacccttagccctggcctctgtccaaagaccagtgctctctccactgccctattccaattaataatggcatctggcacctcagtggacagtgagcccagtgagagcaggaacagttccctcagtagtggttatcaaactgttaacaatgatgctcagagacacgcccctgactctgagtgttgggacctagaaggcacagccaggcaggtccaggagaactgtctgggtctaagaaggtctgagaaccacctccctgccccaccctgcttccaggccctttttaaggccaaaaggaccacctttgaccctaagtgatggggccagtgggaagaaagaagagacaaggcctatcagcattccagtgctttctctctctctcatccaagaggctcagagcttcacagtccttcaggggctatgtctgaggttcatttcagaaagacccagggtggagaggaacctgagtcctaggagagatgatgttttgtgcaccagagagagagggtgggacaagaggtgtcaggtgcactgtgtacttcatctcatggtcgtggtcaatattgatgtctatgatgggtgggaagatctaggagctaaaccccattttggaggtgaagtcacccctctctacatgctggagaggaggatacacatacctgtttatctagattagaattcaccccaaatcttttttgtctgcagggaaacaagagaccagagcaggagtggttcatggggccattggaggagctggtgttacagccctgctcgctctttgtctctgcctcatcttcttcatgtgagcattttctctgggtcaggcatgggccagaggtgaagaggatggacctggtgtagaagggtcctggaggggctgtgagggctggagaaagggcagggggtgtgatgatgtacagaatccagcctgtggccactgggataggcgtgggtctattccagggccctgatctcagatgtccaaggagtgggaggtagagggagaccttgtgactaagtcttgtttgagggctcctggattaatcccaccctttacctgccaaagtccctcattccaggctcataacaatggccccacagcctgagaaaaccaggctcaaagaccctggtgtctcccatcagagtgaagacccacaggaggaaagcagccaggacagcagtgggcaggaatgacacccaccctaccacagggtcagcctccccggtgagtgatggggcatcctggcatccagtctgtcctgcagacacctcctcccaatgtggcccaccgtcatgccccattcagcatttccagaactgagcttattgtctttcctcctgtttaacagtgtaggttttaatatttttcaggtacgttgaggccaacagatcaggagatgatggccattgaaaagatagtttcttggccgggcacagtgtttcacacctgcaatcccagcacctttggaggccaaggcgggcggatcacgaggtcaggagattgagactatcctggctaacatggtgaaaccccgtctctactaaaaatacaaaaaattagccagatgtggtggctggcgcctgtagtcccagctacttgggaggctgaggcaggagaatggtatgaacccgggaggcagagcttgtagtgagccgacatagcaccactgcactccagcctgggtgacagagagagactctgtcccaaaaagaaaaaaaaaatagtttcttattcaccgttcccgagagggcacaccacaccatgcaaggccatatggagaagcaccagggtcagtcaggaagcagagggagcaaggagaaaatgggacaagagccttcactgtggctttcatggaaaagaatgggcaagacagggtaagcaagctaggcaggtttaggattggctacttagaacaatttcagcagactctggggtataggagttgtctctagttgtctggtacatggccctgggtttattaaggaggattgtggtctggagtgtaagagctcaataaaggatccagctggtagtgtgggctttagattgactggtttgcacatgaaaggtgcacttgtatgcaagtcctttattagctctagaaatctactatccttgggaaaggcagtctctcaagggtcagtaatgccccagatgtcaaaacatcagaaacacttggttgacacacccctaaacatacttctcctgatgggttctccatctcgctgatggcactcttgtccccattacccaaccagagacatggccccctcctgtcccagtcctccatctcttcctgtgccagtatgctacgatgcatgtctgagcttcctctgaacacggcttaacacaaccactcctgagccgagagcccctcttactccttattctgctgcagcctcacctcccatttctcctctccagaacattagcatcacctccctaaaaggtcattgtcccatcattcccaagtttgaaatgcactgcttctctacactcctgaaagattggcattccaacaacttggtctggcatttggagcaggaaaaccagagtccccttcagtgctatgctcccccaacattagccactcaatcacctcaagcagggcaagctttctcatctcagaatcattgctgggctgtcccctcctcctcatatgcctaatagctacctgcccaactccagtgcatccttcaagctctgattttttttttaatttatttaactctgactaaagtgaacaccacagtaaagtttttgaacacagggtcaaccagcacccattcattctgaaatatctatataatcccatttgccaattgctctaggtccttgtgccattctgtatttttataaacacacagtttacaaatataaaatattcctcctatcgggggcttaacatttattggggaaagggatgaaaataatgaacaaataagcagtgcaaatatacatgaaataggcatgaaataagtgctatggcaggaaatgaaatgggagaacggattggacagtcctgggggccaaagaatggcctttgggcaaacacctgcagaaagaaagtgagtacagtatgagcagtagagaatcatcaaggaagcagcaagtaccatggctctgaggccggaacacatctgatgttttagagaaacaaagtaggacagtgtggataaggcagagttacgtgttgggggtggagtgtggactgaacaatggtaggtaggaaatgaggttgaagagacataggagctgcaaatattgcaggatcctaagtccatcatagttattgatgcgtttagagcagaagagtgacatgaactgacactcattttagtgggagtcactctggctgctctgtgagaaactctagtatgtagtatagaagagaagataccagaatagaagatacacagataatcaagccaagagatgactgactcagacttagtcccaagtaagaataatgaatctgatgtggagaaattgggttccggatacatcttgaaggtggagtcaacagtatttgcaagtggagtgatggagtgcatgcaaggcatgagcaaagatagctcacgggctctgctcgataagtgtctcagatgtcataggtgggtccacagatatcatagatgtcatggatgtccaagaagaccccatagatgtcatagatgtctatagatgccaatgatgatgttcatgtggttaactcagaattcaaacttaaaaaatcaaattgccaatgattaaaattgccatccttgaaggagaagtctattttcaagtgtatatcaaacattattttggttaccgtaagtttgaggtgcctctgagacatccatgtggagatgacaagtagcaggcaagtgtctggagctcagaagagggctccacgtgggagacacagaggttgggagcttccctatcaacatccaataatcgatgaatctacaaagaagagaaggggtccacagacacagccctggaaccctccagcatttaatgttagggagatgaggtgtaaatggtgagaaagctgagaatgaataggagccaatgaccaggaaattgcaggctgtagtgttggtggccaagggaagatggggcttcatggaggagaggttggtcatttgtttcaaatgctggtaagtctggtaagatggaatctgagaaatggctatttgaatgtagctaagtggtatgacagcaaagcagatctgatttttctgctggaggaagatctcttgactagagagagttcaagagagaatgggaggagaagaggcagaaactgtgagttgaaggactcttttgagaaacactgccccaaatctagaaccaagaaatgggcctgcaccagcaaatggttgtaccctgtagacttgccatttctccagcatctgctcctgtgtctcttatgataccatgttccctgtttgtgtagggctttgcaccacttgaactaactgcattcccatagcttcccctaccacaccatgagctccacaaggaaaagcctgggttttattagacctccatcattctactctctcctgttcatctgcacactgtcacaatttgcaattaccagtctgtttctgtcttcatcccctgcagtactggaaatcacagggcccctgctctgctctgctccctcctgaggatccagtgcccagcacataggaggtcccagagacctgggaccgagttcagggtcaacagatgtgtgactttggaaattacctaagctctctgagacctagtttcctggtctgtaaaatggattaaaataatagatgccaaagatgatgtcagtgtagctgcccagaatttttccacattagtctctgtgagtattcaagagaattgcgaatcaatcaatacgtgctacatgtgttagataatgaataagtagagccttaattaattaacatttgatgaaagaatgaaagagtgaataaatgttctgtcagagtcaaatttacttcattgaccctctttgccttctcctggtccccctcctcactgccctgctctaacccccttctttcctctccataagaaacaccagaagaagtccaagttacatggccccactgaaacctcaagctgttcaggtgccgcccctactgtggagatggatgaggagctgcattatgcttccctcaactttcatgggatgaatccttccaaggacacctccaccgaatactcagaggtcaggacccagtgaggaacccacaagagcatcaggctcagctagaagatccacatcctctacaggtcggggaccaaaggctgattcttggagatttaacaccccacaggcaatgggtttatagacattatgtgagtttcctgctatattaacatcatcttagactttgcaagcagagagtcgtggaatcaaatctgtgctctttcatttgctaagtgtatgatgtcacacaagctccttaaccttccatgtctccattttcttctctgtgaagtaggtataagaagtcctatctcatagggatgctgtgagcattaaataaaggtacacatggaaaacaccagtcctggtgcagtgagagttcggtgcatactggttccttcccccttgaacagaagtcattagtgatatttgatctctggaactatatcagcaacatgtccatctcacttgctgctcaaaaccccaccatatatgtcttccctgacttaccctccaacatcatctctctccactcctgaatcttctcttttcatctcacctgtcccctactcggatttctgctttctttatgtcctgctacagggaaaatcacatattagcatttggggaattttctaaaactcagagctgaccatagtgaaaatagttccctagatccccaacccacaggaataatttgaagcttctcaatgtgacattctaagtcagagatggtcaaccagtattagcaaagggccagatagtaaacatgttcagttttgcaagcaatgtggtctctattgcaactatttaattccgccattgtagcaacaaagcagccacagacaatctgaaaatgaattatatggccatgttccgacaaaatgctatttatcagaacaggcagcccacgggctgtggtgtgctgacctctattctatgttgctctgaatctcgctcagtctactcttccattgccacatcctacactctatggaccccattctaatgcattcctccctgtctgtttgaatccacatccctcttccaagaagggctgtcaccatgtcatcatcgggcaccatctttttatccttccaaatgacctcaaaggtagatgtctaaattgagatggcagaaagaagctcacaatcatcctcccaaaaagcctaattaaaatgataaaaatcagtttaagaaaaccagccccaaattcatcagcagcacccaaaccattacagggggtgaaagcattatgccataagctcacaataccctttagataaacaaatggaagattctggtgttgcggtggctcacgcctgcaattccaacactttgggaggccaagcccgaaccctgctaggctgtgcccgcctccgcctcccctgcccatgggagtggcgggtgcccctccagggtccacctcacccagcccagacccccagggtgctctgccccatagatgggaggcaactgcccagggtgcaggggcagtgagggcgctgctggctgagggacatgccccatcctggggagggagggtgagtgtgtcagggaggggacagccctgcagttgtcagaggtggggctggagcagcacaggtttcctctggttacaaactactcctaggtgcatacctaacagaaatgcatacaaatgttcttcaaatatacagaagaatgttcatagcagcactaattgtaatgactgaaaataaaacctacccaataccaatcaacagtaatacagataaataaattatggattatttctgcaatggaagaagcaaataatgactccatacaacatgtatgaatcttagaaatataatgttgagtgaaagaacccagatacagaaagtacatactatgtgatgtacttgatacaaggtttagaaacacacataactaatctttggtgttcaaagtccagatactggtgactagtggggcggaggtcaggggctggtggttagtaacgactagaagggggcattagggagttctgggagattctggtaaggatctgttctttggggattttgtttgtttgtttttgttttgtttttgagacagaatctctctgtcacccaggctggagtgcagtggtgccatcatgactcactgcagccttgacctccctggttcaagccatctttccacggcagcctccagagtagctgggactacaggcgtgcaccatcacgcctaaataatttttttagtttggtgtagagacatggtctccgcatgttggccaggctggttttgaacttctgggctcaagcgatcctcctgcctcagcctcccagagtgctggaactataggcatgagccactgcacctagcccaggatctttttttttgatctggctactaattgctcagatgtcatcactctgtgaaaatttttttggtaaagcacttgtgatgtgttcccttttctacatgcatgttactctttaatcaaatttacattaatatttttataaattatccttgttagtatttagctctgatctccaaactgtcagcttccccaggtcaggaactgtactatgtccagccctgtatttttagagtccagccttggacacagcacatgaagtgtactcagtaaatctttgaaatgacctgaactcaatccaggtgggaaccacaaggttggactctgatgaggcctcacaagttacatttccagcccaggcctctctcctaagctctaatctcctatattctcctgcacatctctccccgaatgacctgcaggctccatgcttttaatgcaccccaaactggactcatctttccttaagcctggttgtcttccaggtttgccatccagaggtgtgaggattcccatctgcagtcacggcacctggtactcaatgcctgggtgtcttagtttgtttgggttactatagccaactaccataaactgggtggcttataaacaatagaaatttatttctcacagttctagagtctagaaagtccaagatcaagggaccagcagattccatgtctgatgagggctcattttctgattcatagacaatgccttctcgctgtgtcctcacatggtagaaaggcagggaagggagctctctcaggtcgcttttataagggcactaatcccattcatgggggcttcaccctcatgacctaatcacctaccaaaggccccaccttcaaataccatcacactggtgattaggcttcaacatatgaatatggggggacataagcattcagtctatctcaatgagcaaggagagcataacacccctgtgccgagttctaacctcccaccaagacaaaatttctggcctacattcatggtttcttgtgaaacaggcctccttaccttccctaatctctcagatcccaatttaggttcctctgcctgttcctctaagaggccactgtttgaaccacttcctgaatctggtgagtttatacctcttcctcctcctcctcccttctcctggctccctctcctctggggactgtgagctccactggccacagtatgaaatacctcaaggcccaagtacaaggtcttctccagcatgaagcatccttcaacttcgcactaccctgggacgaatctggaactccctcctctgggatcccacaggctcccatccatctctccaccacagctatactcccaggatctagaatctgttaaaattgtcttaacgaaggcagcagaaggcagcaattaaaattttcacttccttcacagtagccaaaaattggaagcaacccaaatgtccatcaactaatgaaggaataaacaaaatctggtacattcctgcaatgcatatcattcagacataaagatgggccgaagtacagatacatgctacaacgtgtatgaacttcgaaagcatcacaccaagtgaaagaagccagacactaaagatcacgtaccatatgattccattgatatgaaatgtctagaataggaaatacatttctggaggcagaaagcaggtcggcggttgccaggggcttcgaggagggcagtgactgcttagtgagtacatgctttccttttggggcaatgaaaatgtttagaaccaaacagaggttgtggttacacaacgttgtgtatgtactgaatgccaccgagttgttcactttaacatgttcattgtatgtaacgtgattttacatcaataaaaaaaaataataatttaagctttcaagtcagatctccagcatctgaacacctgcctcaccactgaacctcctgctacttccatttgcttatctgttaaatggggataatagcaccacttagttcactggttcatcctgaggattcaatgaatcaatgcttgacagagtggctggtgcatgccaagcccccagctcttgggggctggtcaaagtgaactcagccactagccaaattcttcaaggtaatgattcgattcactgaatgacctgcaggtttccagctatatccttgtggcgccaggcttttcacttgcaccctgattacatggctgaccctgtggtcacagggaaaactgacgtgcaagatagtaaaagtgaagtataaagtctatttttttttttttgagatggagtttcgctcttgttgcccaggctggcatgcaatggcacgatctcagctcactgcaacctccgcctcctggattcaagcaattctcctgcttcagcctcccaagtagctgggattacaggcgcctgccaccacacccagctaattttttgtatttttagtactgtcaggctttcaccatgttggccaggctggtcttgaactcctgacctcgggtgatctgcccacctcagcctctcaaagtgctaggactacaggcatgagtcacagtgcccggccatataaagcctattttaagtctccatggccagagttttgttccacttctccctttccctcttcacccattcctgtaagtcaccaagttcctggcctgtccccttccccttactctcagatccaggtcccatcttgactcctcttccccagaacatggcaaaagcctcctccccagcctctgggctccagtcccaccccaaccagcccatcaccaaaaccatcagcaatgggagctttctaatactcacctctaaccctgtatctttcttgctaaatatcctcccatgcctgcctctttgcctcaagatgatgttctgactctagtgagagttattcaagcttttcccaggccaggaacagtggctcatgcctgtaatcccagcactttgggaggctgaggcaagaggattgcttgaggccaggagttaacaccagcctgagcaacatagagagaccctgtttctacaaaagcaaagaacaattagacaggtgtggtggcacgcacttatagtcccagctacttgggaggctgaggtgggaggatcccctgagccaggcgttcaaggttatagtgagctagatcacgccactgcactccagcctgggtaacaaagtgagaccttgtctaaaaaaaaaaaaaaggcctggtgtggtggctcacgcctgtaatcccagcactttgggaggctgaggcagggagatcataaggtcagcagtttgagaccagtctggccaacatggtgaaactccgtctttactaaaaatacaaaaattagctaggcgtggtggcatgcacctgtagtcccagctacgtgaggggctgaggcaggagaatcacttgaacccgggaggcaggggttgcagtgagctgagatcgcaccactgcactccagcctgggcgacagagcaagactctttctcaaaaaacaaaacaaaacaaaacaaaaaataactttttacaatctcaccctcagctaccacccctcacacatctcagccacatcctagagattgcatgtccctctgtgcctctccatgcttcattcatgtggttctgtctctttgcaatattgtcccctgccctccttctttgcagcacacactcatcctttgagagctggttcaaacatcacctcctcagacaagctgcattccctaccctgtcccctctcccagcccctgtactttcccacagcttggattagagcagtttatcaactgctgttggtgggccagttcaggttcttgactttgcggcacaaaagaatttgagagcgagtccaaagtaagagtaggcaaagaagtttattacaaagcgaaagtacaccctgagaggcagagggagggagagacagcctctagcatctcaaggtaattcctttcatgggaactatacatacatattcataaaatattggtgagtccagcatgaaaggcatgcactcagaatctatgtgctctaacacgcattgcatgtatcattagcatataaaatctccacctaggggtgtattttctactattcaaatgaggaaaaggtcactataagctaaactttgaacatagctgcacacgcagagccctggagaagttcccagctcccccaaggcaggaatttgtagctcacagcttcttgggtttttggtgttgattggctggagactggggaaactacaccatgaataagtggcttttgttctctttcccaggccacattaacaggaacttgcaaccatctggtggtctgcttgtatcctgtaggactgtttatcttgcaagagttaggtgctgactcacgagagtgaaaaccaaagaatctgcttcgaaagggatccatggggctttgcgcaaggatacaagtgagtatggcctcctaaccttacttatcctgcctcacaacctcaacgatattcatattctggcatttggggctggataattctttggtggtggtggttaggggagggtgtggcaggtcaggtctccctaaccgctgaacaggcaggcctccataacaactgtctcagcactgattgagtggttaagttaaatattaaaagctgacagagccagtgccctcatacaaaggctggaatgtaacaaaagcccaccaagaattttgcccaggccttttctgggccttgagcataacaagataatgaaggaattcttaacaggacccgtttaggattaaacaagttttattggggggtctgaagaaactcctctaagcctccacaaacaagtttattgggggtctgaaggaactccccaaacctccatgatttagcaggagacaagataagggtaatcaccccagcacctggacccatttagtttaaataaatttactgaggctacagaggaagatcttcaggactgacatcttagttacagattggaagaagttaatcgcttacgtccagatgaatgcactcttacatgtagacaaatagcttagaaggtatatgagctctggaaaactttgtaattttgagttggtctggcaatattttccagatcttctccctgtgcccagttacagaaataaactcccttctctcccagttcacctgcatcttgtcattgggctaagagaataagcagcctgacccttggtttggtccaggaacaagggtgcatggtcagatgttgagcagcgtctctaggttgtacacacaagatgtcagtagctcccctagtccagttttgacaaccaaaaaaggactccagatattgtcaggtgtctatcagggtgcaaaaaagcaccaaattgagaaacactgaactagagccttcctcctctgtattcacatagatacttgaacaaaatgaactttctctagttcttcaagttcactacgaaaaccactatgttgcccaatttctttttttttttgagacagagtctggatccatcactcaggctggagtgcactggtgtgatcttggctcactgcaacctccacctcctgggttcaagcaattctcctgtctcagcctcccaagtagctgggactacaggtgcctgccaccacgtccagctaatttttgtatttttagtagagacggggtttcaccttgttaatcaggcggtctcgaactcctgacctcaggtgatccacccgcctcagcctcccaaagtgttgggattacaggcgtgagccaccgtgtccggccgttgcccaatttcaaaacaatttagtgcatttgaagaagtttatcgcaaagcaaaagtacaccctgagaggcagacggagggagagatagcccctagtgtctcaagggtctcaagacccccagtaaaacttgtttaatcctgaacgggtcctgttaagaattcctttgttatcacatttatgaagacggtcttgagaaatcctgaggttctaatttctttgttttccaaacttttcctgcatgcctactacatgctacaccaatacaggagttaagaaggaattacttaggcccagagcaagggcatgggagtccttggtaaggcttttctttttaatgaaaagcagccccaaatcagtttctaacaaagagcagcctgcaacctgggagcttgcatgagtgaatgacggcaggaactaaggaatggacattttcaagatggccgctccatcttcccttctctgtcacgtgctgtaaggagcagacaaggtggcactgatcaactggaaagtccatttgcataagaagattagggtggggttaccagccttccttgtgtgctatttaaacattatacccgatcaaaccaatctatgagccttatgtgaatcagacaccacctcctcaaatgggactataaaatttgcagcattcaccaccagatggtctttttttccgttccaagaccccttcctctttagaggaagcagtttctctttctcttctcttctacccattaaacctccactcctaaaatcctcgtgtgtttctgtgtcctaaattgtcctggcatgtgccagcggaaccccatgtttataccccaagtaacctagctgcttcagctcctccaagaacatcaaaaggaagaagatacagtccctggctcatatgaaaatataaacttagacacattaaaattttaaagaatttatttgagctgacattcatgaatccagaagtgccaaaccacctagtgggcacacaaggaaaacttttataaggtattcctggaatcaaaacaaagaaaatagtttcatttggttaaaggggaacggtagccttaaagtttgtaattagaggtcaacttgcagtttctgattggtaaagtctctacttagaggttagtaggcagtttcgattggttaagcctaagtttcatttttctaggatatgaccattcactttgagttaggtttgaatttgcttacttggaaacaaaggccttggagccatctcagcctaatggcttcccagttagttattttgacaattgggagagctcaagttcatggggtaatgtttgggaaagggacagaaataggtaacttactgaaacacagtatgataaggttcctataaagatggcaaaggatataaattatggggataattatggcctagggtctggggacccaagggcaagagctttcagggatgggaaagaagttagaaaaggcttctcagaggaagcccctttctaactgcaccttgaagggaaagcaagagccagcaagcagagaagcgaggaaaagcagtttaggtactgataatatcaattacaaagcaaggaggtagaagaggggctggcagatgtttaggtaatagcagtcagtctgctacagctagggtaaagggaacaaagtcaggtcccctctcgggaagtctatctggggcctgctctgcaagctgtaagggccatggagtaaggccctggagggtgaacatcatccttcagtctgtcacattaaaaaaaaaaaatctgcacataaataaggcaagattttatccaaaacaattattccaataaagggagaagaatctttgcagcagtggaaggggaactgctgcaacagggaggtggagactgttgtaatagggagtggaggtctcccatgtaccataaaacaaaaccaaaaagtgagcttctattctagtggcacagtcaaaccataaacaaaaataccattagcaaatgatatttagcacaaagtgtttttgttacaggaaaggggttctgatccagaccccaagagaggattcttgtatctcttgcaagaaagaattcagggctattccatagagtaacgtggaagcaagtttattaagaaagtaaaagaataaaagaatgattacttcatagagcagccccgagggctgctggttgcccatttttatggttatttcttgatgacatgctaaagaaagggtgaattattcatgcctcccctttttagaccatatagtgtaacttcctgacgttgccatggcatttgtgaaccgtcatggtgctggtaggagtgtagcagtgaggattaccagaggtcactctcattgtcatcttggttttggtgggatttggctggcttcttttttttttttttccttttgagtcagagtctcactctgttgcccaggctggagtgcagtggtgcaatctcggctcactgcaacttccacctcgcggattcaagcgattctcctgcctcaacctcccaagtagctggggttacaggtgcctgccaccacgcccagctaatttttgtatttttagtagacagggtttcgccatgttggcaggctggtctcaaactcctgacctcaggtaatccgcccgcctcagcctcccaaagtgctgggattacaggcgtgagtcaccgagcccagccttggctggtttctttactgcaacctgttttatcagcaaggtctttatgacctgtatcttgtgctgaccgcctatatcatcctgtaacttagaatgccttagccctctgggaatgcagcccagcaggtctcagcctcattttacccagctcctattcaagacggagttgctctggctcaaatgcctctgtcattttgaaagtgtaatgggtaagaaagtgcgtgacggataaagtgtgagaaaaaataaacagggttaaacaagaggaacggagtcctcagggttggagaggagtgtggtttcatcagcacgggctggaaaggccttgctgggaagaaaattggcccacaaactaccctggcaccgcccccagctgcggattggctcaagccctcaagatccaattgggcacaaaggttggaggagggagttgcagttgcagttcctgattgactctggcagccgtgcatcagctcccaggggcacacgcctgtgggcacaatgcttctgcttcattgattggctgtagaaaaagctcatgcagcctctgattggctataaaataagcccatgcagcctctgattggctgcaacataagcccatgcagcctctcattggttgtaaaataagcacatgcagcctctgattggctgtgtaaagtaagcccatgcagccgctgattggctgcgggtggatgcactcacctaaggatgcgagctagcaggtcttgcagcggctatcacgcccctcacgccgctatctctgtgcagccgactgaggatccctagtcgcataaggctgtgcctggcctgttggcgtccctggcagttgttgggttctggcggttgttgggtccctggcagttgttggcggttgttgggttccttcattgaaactgcactaactgggcttccagtcagcgtcagtcagcggatccttgggccgtggggcagccgcaggtcggttaggccaccagggcggctctcgtgccagtgaggcccctgagagccctttggtcagacagaggctaaatctgaacagtcaggcggtgagattaagcatagtcagggagttcgccaggagccagcgttcctcagcctccaccacgtcagtcacctggtcagccagagggcagctggggcgacatccatctaccaagaaggtaagcaagcggcccgtgggttcacaatcaggtcagtgcccttatgagtcaacggttagtccctttgaaaatcagttcatgagaaaatccactcccttcagaacctgccctgttcattggttagttaggctcccgctaagtcggtctcttggtaagttacacccctgcaaggcacccagtcattactcacacagttatcccatgtgtgtctatcagtttcattgttagttatcctggctttccctagaaaatcgttttcctcaccataaataggtcagtcattagtaagtcagcccttcccttagaaagccgaacacctttgcatcactcacaccctgctaaggaaatacacagatggaagtgtgctgagaacagagaatatcctgagccctttggaacaagagacagaaggaaaattgagagacatgatggtgaaggaaaattgagagacatggtggtcaaggaaaataggctgggcgcagtggctcacgtctgtaatcccagcactttgggaggctgaggccggggatcacttgaggtcaggagttcaagaccagcctggccaacatggtgaaaccccgtctcttccaaaaatacaaaaattagatgggcatcgtggcccgtgcctgtagtcccagctactcgggaggctgaggcaggagaatcacttgaaccccgtaggcagaggttgcagtgagccaagatcgtgccactgcactccagcctgggcaacacagcgagactctgtctcaaaaaaaaaaaaagaaaagaaaagaaaaagaaaatataatgggtgcatgacgagtcatcacatgtatgctctaaaactgatggagagaagaaagaagaaatcagaattttgtacttaaatggatcattacatctccagcagtaaaacccactcatgttacacatgaggaaataagaagagggaaaatacttgaccacagttattcagtgctttactggcaaatcctggcccaggacctagacaaggctcattccgaccatctaacatgggcttttaaacagaagaaaggggaaggaaaaaaaaattgacaatgcaaaaagaaagtggatatgtggcgtgaatgagagaggcatttaacgacctggaaacttgggcgatatcttttttatgtgagaaggaaaaagggcaatcagtctggaggctaagggttgggagcacagaccactcagagaggtctgttaaaacatgccgaaatatggaataggaaaggacagggctggttccagaactctgggaagggattaggggtggtcaagagtggtcccaggctgagtgtgttggttcacggctgcaatcccagcactttgggaggctgaggtgagaagactgcttgagcccaggagttcgagaccagcctgggtaacatagtgagactctgtctctacaaaaaaaattttttcattagctggacctggtggcttgtgcttatagtcccagctactctggaggctgaggtgggaggatcacttgagcctggaaagtcgaggctgcagtgagccatgttcatgccactgcactccagaccctgtgttaaaaaaaaacaaaaaaaaagtggttccaagttaaatgctgataggagctaagcagggaacctaatacatagtaactaacattttttgattgcttaccaaatgtgaggttctgttctactgactcatttaatcttaacaacaactctaagatgggtgctattattatccatgtttttaaaatgagcaagtaggcctagagagaggtgaagctacttgcacactataaaacagctaaccttcatatctaggcagtttgacttgaatttaaaatttaaaaaaaagagagagagagaagctggttgtttgaattttttgtgaagtgctctgattattaaatgttatcccattttaaaagttagttttaaaaagtaagcatttgtaggccaaacaaaattcatttatgattgtttttagtctctgaagcaggctgacagtgagggaagtgacttacccagaatcacccaggaagtagcgacaaagattaggtcttctgacttctggtccacttccaggaaaaatctaagtatactgtgtgtcacatcagggctagctgatttattcttatattttattcatgaggaagtgaatttggagaggagaatgaacttcaccatgcttatacagcagtttttaaggcaaaatagaatcatgaaaaagacaccacagttgtagtcaaaggttgagtctgaaatctatgaacgtaacggctgcatgtcttggggccagtcatagtacttttgtggatctctgccttccttttggaagtgttgataatgagatgtacctcacagagttgttgagactaagataaaagataaaatttctacgtctctagagttgtaaatggcaaccatagtttctcattagatgttaaccaaaaaagtagttaacagtcatggcatgattcagtcattcccaattgattcacagcagggcacagtggctcatgcctgtaatcctagcactttgggaggctgaggcgggagaattgcttaagcccaggagttcaaaaccagcctgggcaatatagcaagactcgactctctctctacagaaaatattttttttaaatgaattgggtctagtagtgtgcccttaaagtcccagctactcgagagactgatgtgggaggactacttgagctcaggagttcgaggctgtagatagctgtgattgtaccactgcacaccagccagggtgacagggtgagactccatctctttaaaaaaaaaaaaaaaaggattgattcacagtatccaaatagtagaaacaacccaaatgccatcaactgatgaatggataaacaaaatgtggtctatccatacaatggaatattattcaacgataacaatgaaaggagtactgatatctggtacaacatgaattagccttgaaagcatgctaaatgaaagaagccagacacaaaagaccacatattatatcatttcatttatatacaatgtccagaataggcaaatttataattacggaaaatagattagtggttgcctacaactagggggtggagttggggtttggggaaacggggagtaaatgttaatagatattggtgtttttagggaggtgatgaaagtgctctggaattaggtaatggtgatgtctgcatatctttatgaatatactaaaactcctaaattgtgtgcactttaaaatggtgaatttatggtatatgaattatagctcaataaaaataaaaaaattaattataaaaaggttagctaccagtagacccatggctaaataaaaacctgaaaattttagggaaaactagatactcacatggaaattggacacttagtttataccaaatacaaaaataaactcaaaatgggttaaagacttaaatatagccaggcgcagtggctcacgcctgtaatcccagcactttgggaggccagggagggtggatcacttgatgccaggagtttgagaccagtctggccaacatggtgaaaccctgtctctactaaaaatacaaaagttagccaggcatggtggagcacgcctgtaatcccagctactcaggaggctgaggcacaagaatcgcttgcacccaggagatggaggttgcagtgagccaagatcatgccactgcactccagcctgggcaacagagtggggaccctgtctcaagaaaaaaaaaaaaaaagacttaaatataagaactgagattgtaaaactactaaaagaaaacatcggagaaaacttctgtatatttatatgtaatacacaataaaaattattggtttgggaaatagttatttggatatttctgcaaaaacacaggaaacaaaagcaaaaattgacatgcaagattgcagcaaagtagtttctgaacagcaaaggaaacaatcaacagagtgaagagacaacctacagaatgggagaaaatatttgcaaagcatccatctaataaggggctaatatccaaaatacataaggaactcaaacaactcaatagcaaaaaaatcaaataacccaattaaaaaatgggcaaggacctgaataggcatttcataaaagaagacataccaaaatggccaacaagtatataaaaaaaatgcctgacatcactaatcatcagagaaatgcaaattcaaaccacagatatcaccttatacctattagatgggtatatcaagaaggcaaaagatagcaagtgttgatgaggatgtggggaaaagtaaaccttgtacactgttggtggaaatgtaaattggtataaccactatggaaaatagtatagagtatcctttaaaaattaaaaatagaactaccatatgattcaggaatcccacttctaggcatgtatttgacagaaatgaactcagtatcttgaagagatatctgcactcctgtgttcattgcagcattattcaccatagcccacacgtggaatcaacgtaagtgtccattaatagatgagtaaagaaaatattatatatgtatacacacatgcacgcacacacacacacacaccccattcaaataatgtcattttgttcaacattgtctaatcataagagaaaaaaatcaattcccagccagtaccagtatctgtgtggagtttgcatgttcttatatatggtaaaattggtttcattttacatcatttcacttaaagcagcagtttccaagaactgaatgatgatgttaagtgaggatttattgtgcacacacacatacacacacagtggaagttattcagccttaaaaaaggacatcttgccatttgcagcaacgtaaataaacctgaaagacattatgctatgtgaaacaagtcagacacagaaagacaagtactgcatgatctcacttatatgtagaatctaagaaagtcaaacgcatggaagcaaagtatagaatggtggttgccagggctgagggctaagggaaatgagatattgatcaaggggcacaaagtttcagctaggcagaatgaataagttctggaggtttcatgtgcaccatggtgactatggtaaataacactgtactgtatacttgaaattttgtgacagtaaatattaagtgttctcaccaccaaaaaaatggtaactgtgaagtgctgattatgttaattcactggattgtggtaatcattccacagtgcatacatacatcaaaacgtcatgtcgtacaccttaagtatatacaatttttatttgtcagttatacctcaataaacctggaattaaaaaactgaaaattctataatctcatctctgatcactgctctaaccataggtaagcactggtatcaaattatacatcattctagatctttgttttactcattcatgtatgtatagttttgagtgtattatatatgaatatgtagatacatatttacatattatatatataaagcttttatataaatgacaaatgatccagttttcatttaaagattgtgaaatatttcagacatatagaaagatataaatatggtataatgagcatatacccaccaccagcttaatattgaaaacactggctgggcacggtagctcacacctgtaatcctagcactttaggaagcccaggtgggaggacggcttgagcctaggagttcaagaccagcctgggcaacataacaagatcccatctctacataaattaaaaaattagtcaggcatggtggcacatgcttgtagtcccagctacttgggaggctgaggtgggaagattgcttgagcctgggaggtcaagcctgcagtgaactgtgaatgctccgttgcactccatccagtctgggtgacagagcaagaaactgtctcaaaaaaaaaaaaaagaaaagaaaagaaagaaaacactacccctggtatactcccttccccaaacacatctcccactctcaaacatagagatcgctgctattctgaatttgacattttattctgtgtactaaggaacttaaccttgcctgaagagaagtctggcctttgcccttggcttctggaagacactccctagctcttagaatgtcacacctcataggggtgtctttgtttgcccagggaccttgcatcacactgaatattctagaaatgtgatttaggatgagggctggccacaccagataatgttaacaatgtgatttagagtggaagcaataccagatagtctaacaatgtgatttagaataggggctttggatcaaatggtatcagctcaacttcaggaggagctggatgctaagatccaccatgagggaagtcaccatgttacacgatggaggcccaataaaaacactggacacaaggcttgggtgagcttctttagttgacagtactatgcatattgtcacacattatcaccaggaaagctaagttatgctgtccatgactccacagggagaggataactagaagctttgtgtggggaacttctggcctctgccctgtatgtcttcccttggctgattttaatctctatcctttagttgtagtaaacagtaatcacgagtataacagctttcagtgaattctgtgagtacttctagtgaattaccaaacctaagggtagttttggggttccaaaaccttgcaaatgatttgagaaatgagggtaatcagggatccttgatatcttcagttggtgtcagaaatgaggggatcttgtggaccattccctaacttttcagttgtatcagaaatgggattcactagaacagccctgactcactgaaacatatggtttgaaaagaggaaggatgtgaagtcaagatgataagcctttgattcctgggctgtcctgcggtcacctgtgcgtatagaaatgcagctgttctgcaaacagttacaggaggtaaaagttaccattgctttttcaatacaatggatccaacccccaaggagctgacccactggatgcataaggaaacaaactaaataggcagtcccttggctatttttatctgtaatcgttaaaatgaaagtggctgaggcggatcctgatgctggcccaatcttgggctctggccagcctgagctacagctgctagcctcagggctgtggctaaagggaaaagttaggctgaaatgacagatggcaaagaaaattagagtggttcaccagagagtgagaaaagacgaacatttccaagagggtggaaatctttataaacagttattaagaaatgagatgagttaagtggacattgagggagtctaaacaaaggtctcagtggagcactcttagaaattaggtggagcagtgagaacctagacttgccctccagtgttgaaggtcccccatcaagtctgctatatttaccctagtttggaggaattttagaagccagaaggcaaacatgacaatgggaaatctgacctcagatctcctgaggggacgaacatgtgatctaatcaagataaatgacaaaagggcctgggttgcttggcctgacccctaactgaagacccaaagtcatatgcatattagtagtaaaatagtcaggggatggataagagatatttctgggactcatgtgggagtcttatacctgcattccaaaaggttggtgaaattctaatagcatctatggttagattgcgaagacataggattacaaagtggatgagattcaggcgaaactttggatgaaaattggaatgtttggacagactatgtaaatatgttatgtgaatgtatttacctaaatgtattatgaggaaagatattgtgtccaactatggaagagttcccctacgtactattatgaaacagaaggcatgtaaatcttcccttcaaccaatattgattgaatatgctaaataggaaccaataagattgcccaagcccacactaattgttaatttgaaacagtacaggatatctggtggacaaaacatgttagaagcttaacgtttgctttatttaggcagactggagctaaggccagtgagcaccacccagtggtgaatgctgggatttggggccagaaaatttccaatggagagacaactagctgcctattgggctttgagtctgccccatcattgaaggatataataatcctgacacctgaaatcctcatgatgtgtttgtcatgttggaaaaacactgtagtaaggaaggccatgcccaaaagagtctcgtaataaaatggaaattgtttatacaggaacatgctaccagggaaatgcaaggaggtcctcgttatatttatgaacaggtggctttttccctactgaagagctgcgagatcctattattacttgaatgatgtctattaatagctcttgattgaccaactaagagcggtttgatttatggatggcaattccaaagtgaattaataacatcctgtttggaagactggcactcatactgaggaaggcaaaaacaagtcacttcagtgggctgaactgcctccacatttgggtttttaccaattcatgggcagtggccaatggcctggccatatggtcaggcagatgggcaatgggaaactgtactattaaaaggatgcctatatagggtacagccttatggaattcactatagccagtatctcaaaagacctgttcataccccctacaaatgataaaataaacagagaaacagacctcttcctcccaaaaaggcaattaatatcctaccttttatgctggacatttcttggcaacttttaaaggatttttactacttgtgtgtgcgttcttaaacacttgattttgcccggtttttttcaaattttaaagaaatgctcatacattattacttatttgtgtctggctttgttcattcaatattttatttgtaagaatggtccatgttgttgcatctagcattagctcataggtttttgttgctgtgtagtatctcattttttaaaattctctgtttactggcatttggattgtttacctttttagctatttttaaataataccactgtaaacatttttgcattcctttgtggcgtacatatgcacaaacatttctataaagtatacatctgggagtggaattgagggtcatagagtatgtgtatcttctgctttgataaataactttgttgccctgatttatatttccaccaatagtgtgtgaaagttgagtaccacattctcaccaagacttgatatattgtcttggatatgtactggtatctgatggttttaacaggcattttgctggttattaatgagattttaaatattttcatggaaattttattaagatttgtcttatgatccagctgtggccaatttctgtaaacgttctctgtgtgcttacaaagaaattgtattctgcagttattgattgcagtattctctatatatttttggtcaaatttgctgatcaagttgttgaaatctttatatattccaatagtctgtttgttctgtcagtttctgagagaacagtgattaaaatgtcacactactattgtggatgtctgtttctccttttatttttgtagattttttgctttatatatttttggactatgttagtaggcaaacacaaattttaaatatatactttattcctgttaatgtcagcttatcattaggagatatgccattctatctttggtaatgccttttgcttaaagtctgctttatgggatgttaatgtaggtatgtctacattacctggctttctggttggtatttgcttggtgtatgttttcattctttggttttttctttttttctttttttgagacggagtcttgctctgtcgcccaggctggagtgcagtggcatgatctcggctcactgcaagctctgcctcccaggttcatgccattctcctgcctcggcctcctgagtagctgggattacaggggcccgccaccacacccagctaattttttgtatttttagtagagacggggtttcaccgtgttagccaggatggtctggatctcctgacctcgtgatccgcccgtctcggcctcccaaagtgctgggattacaggcatgagccaccgctcccggcccatttggttttttaactgtcctttacacttatgctttggttgtgtcttttgtaaacagcatggagtttggctttgcttcttttttccaatatgatgatcttagattcataactggataatttaagccatttatatttagttaaatcactgatgtattggagtttaaatctaacatctaggtacatgatttctacttgtcccaaccgttctattctcttttgtatcccttctgtttgtttctctgtctttattttcaaacaagcttttaaatcaaagtacaattttatacagagaagtattaatacagatagtaagtatacaactcaaattatcacaaagggagcagaccagtgtaaccaccactgaggtcaagaaatagaacattaacaacaccccaaacactccactcatgtactacaccattcattaccccctttatccttgctatgttctggatgcaagcacgttgtatgtgttgcaagtatgttctccagccctgcaacttgcatttgtcctccttaatggtatcttttgatgcagaaattaattctgatacagtccattttatccatatttcctcatagctagtgctttttggcccttttaaagaaatatttccttacctaaaacttaccaagatactctcctatgttgtattaaagaattccactgaccaatgtggtagctactaactacatatggctattgagcccttatattatggctagtctgaattgaagtgtgctgtaagtgtaaaatatatacaagattttgaagagtgtataaagaatgtaccaaatcttaacaattttgtgttgattgcatgttgaaatattgggttaggttcaatatgaataacctagtgaataacctaggtttctttcactaggttaaatgaaacatcattaaaattaattttacccatttcttcctttttaatgtggctgctagaaaatttaaaattatacatgtagtccacatttataggtcacattatatttcttcacacagcactgttctagaaaaaaagtctaaggactttcccaatgtccctagaagttatttttatgtatgacatgaggtaggggtcttatttccttttgctgtatggctgtccagttattctgacacaatttattcaaaagagagtcctttaacttctatgcagtgccatatttatcctaaaccaagtgatcacatatgtataggtatttttctaaccatatagcctgtcccattggtatttttatttatccttgtgtcaataccatactctatgaattactatgtatgtatgtatgtattttatttatttacttatttattttgagataaagtcttactctgtagcccaaagctacagtgcagtggcgtgatcacggctgactgcagccttgacctccctacctcaggtgatcctcccaccttaacctttcaagtagctgggactacaggtgcgtaccaccacacccagataatttttgtattttttgtagaaacggggttttaccatgttgcccacgctggaattactatggatttttaagtcatgatatccagtaggaattggaattgatcatttttttgagacagggtctcgtgctgtctcttttttaatagaaatttactgagaacaaatttattaaataaatgtctacatgggatataaaagggaacattgtgccatgctatacaatgttacttacaccattcatttcaaattttatggcaaaacaattatactgtggtagggagatgttgttttacacttctcaccaaactaaacattatcatatttttcctgagagaatgtcaacactttgctatcttaagtgatcacaccactgcaatccagactgggtgacagagagagagaaagaccctgtctcaaaaacaaaaacaaaccgggcatagtggcttatgcctgtaatctcagctgtttgggaggccaaggcgggtcaggtgtttgagaccagcctggccaacatggtgaaacctcatctctactaaaactacaaaaattatttggccatggtggtgaatacctgtaattccagctactcgggaggctaaggcagaagagtcgcttgaacatgggagatggagattgcagtgagccgagatcgagccactgcactccagcctgggcgacagagtaagattccatctcaaaaaacaaaaataaaacaaagaataaagcagacatgacactgaggcttcacagacaatcttagttgcctccctgtccgtacgtgctcatgagcctctcatcccatataattcctgcttctccaggtgaacaggccttcacgatgaccagagacagaagcccctgacttggctaaagatacttctgctctccccatccccacatcctctttcagttacgcatcacctcactccttctgaaccatatggttctgatgtcagagccagtgtagtaaagagcttctgctgttcctgagaactgttgctgctggaagtgatgcttccactgctacagctgggtaagtaaggtgagaagcagcactggaggtgtgtttggaagccaagactccagggcctgggtgttggcagggcagaggatgggctatggaggcatggagaaagaggacatatgggcataagtaccaaataatcaacatgaattagacagcttctgtgtgtcagattttgacagggctggtgtgtctgaagcaaatagcaaattgggcaagggagagggatggagagtgtaggtgctatgaaggcatgagagcactaggagctgtttcagacattactggaagccctgaagttaagtttttcagtgtttctgtgggcacactttgccaggtggaaaagacaattcagaggacagccatagaggggtccgtacatgagagtcccccgcagattcctcaacagcgccccgcaagtgactcaggtgaagagaccgagatcaggagctactggttaggggaaaattacccctttcttccagtaacctcaaaaaacttcaacgaaaaagtgtgtgtcaacactgaagacagattcctcattattagagaccttgatgaatgtgactgttccctcctaatccatgatattcatcaaatggccaccatgtcctacctgttctaaatagagcgaggcaatttccagcattcttacacagaagatgccatagtacatttggcttccagtgaatgttccaccaaagaccacttgagaccgggaagaaggaaattaagaaaggtgttctgtttattgaatgggtaatacttcactacgcactgagctgggtgcactgcaaatcttggggcattcattcttataacgatgataatatgagataggttcagcaaatatcccgattttccaggctaggaaacagcaatgataaggggagtgacttgcccagcagcacccagacaggaagtgatggagggagaattggtcatagagcctaagaggaacattgcaggtgggaagaagagaagcagagtaggaggtctggcttggacttctagccttgcagggtaggtgagggatcacagacaatgtagagcctcaggaaatttacttgccacccctcaagaaggtctagcgatcaggttcaggccagatgaggacagaagatagaggggaactggtctgggaggcctgaatcctgtgggcttccagaaagtccttctgaagctccttgtgaatagcaagtaaagagaaggctgcatgctggagaaactggaagagggaagccaggatgccttgctgactcctgacccttcctccccacagtacctgctaagctgctcaactcctcttgctccttggagaagacactgcagtgcagctgttccttccatgggattcccacaccctctgtgcagtggtggatgggaggagtccccgtgggtgtggatggcatggatggcagcctccaagtgacttccaccatgcttggcccctgggctaacagcaccatcagcctaactgaagagccagaaatgggcatgagacttctctgtgaggggaagaaccaaaacggaacccatgctttgagcatcctactgatgtcaagtgagggtggagggggctcggtgactgggtgaggacaataagcgggatggggacagtcactggggctagagaatggagcagagttttggctccgatgccaaacttctcacatgctctctgcttccaggaaagagttctttggctgcccaggccttcgtgaaagggctgatccagggtgctatctatgcgggaattgtaattgcgctgctcttcctctgcctcctccctctcatgtgagtactagggttaatattcacccgcaagcctactaccgggcaggccctggctgcagccctggcacagagagagcaaagacaggacccctcccctcaaggagcttagggtctaaagagggaaagatgtaccaaacatggtcaccacaatccagggccatgaggactatacagaaccgtaaaactgtgtcataaaacagacactttgaacacattttataaaggagaagaccaagaagggacttggcagccctggaaaaggcagcagcgagtccccggggtgctgtctgtggtgggcctgcaagggttcagtactcgttagcttggtggaaagtattaatagtacaggttgagtatctaatccaaaaatccaaaatccgaaatgctccaaagtccaaaagttctcgaggcaccgacataatgccacaagtagaaaattccacacctgacctcatgtgatagttcaatgcacacaaactttatttcatgcacaaaataattttaaatattatataaaattaccttcaggccatgtgtataaggtatatatgaaacataaatgaattttgtttttatacttggctcctatccccaagatatgtcattatgtataaacaaatattccaaaatctaaaaaaaaaaaaaaaaattgaaatctgaaacacttctggccccaggcatttcagataagggatatctaacctttgtatgcagacgcccagaggcatgtttgaggcatttccagtgtctttgtataatgtcaggtgcattgagagtaccaggtaatggctaaaaatgaggttgaaagacatccttggtgttggttcacagggtgttaaaacttagctgcatgtattagctagaagcatggagtgggaaggggtgagttgcaggaagtcaggccagagagacgggcaggggagcctgtccagacagcttggactgaatcctcatttcggagccatggaagagtgctaagctgtgaaggaaagcttgagcttggggtgggacacagattagagagagtgagagccagaaggtcagaggccaggcaggaagctggtgcaggggactaagcaggaaatagaaggcctgacctggggcaagtgatgaggggcagccagagaggtgggacttgggcatggctggctatggggagacaaagatgaggagtgaggtgtcagggcaaactgaggagctattttcaaagtataatcaacaggacttgaagaccagtaacaatctctctgccagttgcaaggccctttcttagctgacctcatctgagccccacagcctaataagcagggtatcccccttattcagagtgtgaaactaattcccagagaggatgtgtggcttgccctaggtcatacagcaagctggtactgttgttgaggctctaaatcagaagttctggtcaagatagagcccatttggggattcagggagatggagagccagaaccaatccaaggcttatttccttagagtgaaacatatcagaaagaagcaggcgaagaaagctgcagcgatcagagcaaaaaagagctctaaagtcagagcaagccaagaacttgagatgtctctgaagcctgaggaaccaggaaaacccgtagtcgccacattttctgagagccggatattggtatgtacctattgtgtctggaatctagtctatcggaatactgataataagacccacagggaaaggagcacacagtgttttgaaggtgttatcatcctcagtcttgcaggatacctaatgctagagtgtgctttcaggtcattttataaataggaagctaaggcccagagaggagaaggatgaaagttaagagaaacaatttaaagaacaattaaaatcaatttacacgcacacaccattacattgaatccccactgaaaaggcagttggggaaaatcctaatagcagttgtagcatcagagtggaaaccaaggatttggcctctgagtgtatggccggcagcagtcagcttggtgtagatgccacaggccaagtcagcctgaagtggttagagattaggccaagcccaggttactccttcattcaccctgtaccccacatcttcagcagggcttggaagatacagtgtccgaggttgctatgcctcactgttatttaccgtttatgattctccagaatcagaattatcctgctgccctcctaacaccctgcatgaacagttggtgtccttttgtagataagccatctgttaaattccaccaatatttcctgcaatatctcctaatctttgtgctcgacaatgctggggtctcagaaatgggccaaacctaggccttgtcctcagagagcaactagactggtcgagaaggcaccttcacagtaggggatgctgagccaggagttacggtggtgcagaagagggagggaccaaacctacctgaggaagtcaggcaagattccctgaggagtctaaggaacagtcagtgttatgggtactgaagatgcacagagaggaccagatggagaagaccgagttgcaggctttaaccatggggttgtgaggaagggctaagccagtgctcactccatgttgccttaattctgtgcacaagggggtgtctttttaagatttggatacctcacctctagacctgttccaacattcttttttctttgttctattttgcacctcgctttcaggaaaagcaagataaacgagccagctaagcctgtggaacatgcctcatacctggagtcgccattatccctggaattacaaagatctgcaaaatttatagcgctcacagaaaccctggaggctgtaataaacctggagccccctggactctcctcagctcacaaaaccctctcaattcctacacatcccttaacactcattctccattgaataggtggttactcttagacctagtcttagaacctctgaagacacactttgtaatttgttgtttggctaaatgagaagaaatctgtgccaccctgggaaggtgtcaaaagaaggaaaaatacatgtgacaatatgaatcaagtccatcagcaagttacttttgagcgcctactgtgtgtcagtgcctgagatacacctacaagagcgccaggctttcaagccttcatatctggatagaatcccaacttcagtgcttggtggctgtctatctttggacaagatctttcattccccatcctttgaacatcacatgacccatatctgggtggagaatgggtgaaaagtactgttcagagatgcaggtgagaaaaaacatgacgatgggccctgaatgccaagattcattggagctttggagctttatcttgtaggaccttatcctgactcccttagaatgtaagttccaagagaacagggactttgtctgccttgttttctacttttatcaccagcacccagaatgatgcctaaaatacaataagatctcaagaatgtttgtcaaatgatttaattaattataagctgttttaaggtttgaagcaagcaagtagagtgaccagatatagacagaaaaatcatttccgtaccctgaccccacatatgatatatttagaatgggtaaggctggaggtaaagatgctagttaggaggttatcgcaatagttcttggccagattgaaaggcaggcatgcaaggaatgggaaagggattctggcattagaatgaaccacaactatgtattgttcctctcagaatggatgacaacctcctttctagccagatgctagtagattttttttttttttgagatggagttttgctcttgttgcccaagctggagtacaatggtgcaatctcggctcactgcaacctctgcctcccgggttcaagtgattctcctgcctcagcctcccgagtagctgggattacaggcacacaccatcacacccagctaattttttatagttttagtagagacagggtttcaccatgttggccaggctggtctcaaactcctgacctcaggtgatccacctaccccggccgcccaaagtactgggattacaggagtgagccaccgtgcctggccagatgctagtagttttcagtaggtggaaagagggtcatctcttccctggggcaatatttgtgggtaaatacagtgatcctgtagcaccagctagatggtcatcttatactcagggtggacgtttacgttagcccccacatgtataagcacctctcacaggcagttcacatttcacagaaatatcagatgtgccaccatgtgccagataatgaggggaagaagtaagacactcaccctgcctccgtggagtcatggtctacatagacagacgatgaagaaatgcagacgaatttatagcttaaaatgttgataagtgctagaaagaaaacaggacagaatactatgagaaagcacaggaaaggaagctaggttggattacagagtcagagaaggcctctcagagaaagtgacacttgccttgagacctataggattattaggagctggctagacagagggagcagtagatcctaagctctgacatgagaacagtttggtgagttcaggagcccagagcaggccgctgtgactggaattgactgagggatgagctcctgaagggccagaacttgcaggccttccagggctctagtgggaagtttaggttttgtcctcacttatggagggttatttcctcttatgctttgtaattctggaaagtgcagattgtttgagaatcacatccagtggagctgtgtgagaatcctgggcagcagaggttttgagttgaggatagaagcctctatgtaacaggtttggtgtttgcttctactaaagatacatcctctgtttgggagggagaggcagacaaggctggggagagggagagtgccagtgttgggaaagaagagaaaaaaatgtagaaaaggaataggagagaggatagggatcgggttggagataggtcagagatgggtttgggaatgggaatagagaggctgggcttcatcgtgtgtcttgttttctcggtgataggggcctcgcgtgcaggacaggaaacaatgagtacacagggtgccttctgaccagccctggggtccagcactagtcattttgtgccttagttaatgccttgacttcccgcacataccaggttgagagaggaacgtcccttagcaactgattggcctggagtctagaggactggtgggggtctggaaccagctgcccaaggaaaacgattctcccaatgtccgggggacgcagtagcaactgttgcttctgactagctcaggctctggagacccgcgcgctctcttatgcggctgcgcatcccagcagctcccgcgagaagggtcaggccctgattggctctggacaaacccgcgcgagcttgcggggcggggcttcaagggattggtatccccgtgcaaggaggttggcgaggcctcaggggactcccagttcagcgaatccgttagccttcctctgccttagtcacttccccgtgaggcactccgtgtttgtgtacacggttattccacgtgtcagtcagttcatcgggcgcatccggagtcattgaaaacagtaataggaagtcaaacaaacccgcttgatgcaaaaattcaggaggacattcggtttttaaggaaatagtgctgaggaaggaccaggctggagctccttggaccctgagactgggaggtaaatatggaaaaagaagtgataatttagggggagggaaaagagatcacctgtgaagaaaactcacgcacacaccagggcctggagaaggaagtgagactggaaagagatcagaattttatttttatttcattattttattcatctatttaatttgagacagtgtcttgctctgtcacccaggctggagttcagtggcacaatctcagctcactgcagcctcgacctcccaggctcaagcagtcctcccacctcagcttccagagtagctgcacccacaatgccgggctaattttttaaattgttttgtagagacagggtgtcgctgtgttgcccaggctggtctcaaacttctgggctcaagcgatcctcccacctcagcctcccaaagtgctgggattacagatgtgagagatcagagtttttgaatctgaaggacccttacatagtctgcagtaaccctcccattctaccgaggaggaaaaagagggggaagcagaaaggggacagaacttgcccagagctatccaacgagttactggcaaagccccagttggaaccagcccagagctcttcccaacctttgattcgaggttgtaaattaaaggaggaggaggaaggattttgatagtgaaaaaaaagcaaaagtgggttatgatgcagagataggatttgttatctggaagcctgagtagcatcttgatgtaaggagggagtcgtttttttaagagaggcagcgatcagaatggaaaagcagagggctggttcttgaatcaaaacatcactgagaaaagagatgagtcaagagcggtcacaaattaaatgctgagggaaccaggcaggtgatgtgaatgataaacagttgcctagcacttattttgtgctggcctctgttctgagggttttacatgcattcattcatttaatcatttaatgctcccaacaattctgtcagatgaatcctgttaaaatctacatgttataagtgaggaaacgggaaacccagagaggggaagtaatttgcccacagtcacacagctggcaaatggtggcgccagacttaaactcaggcaggctgactcagcacacggtcttaaccactgtgttatatgcccctcccaggtgagtgcagcagggagagcaggggcagcaatggactggagaacaattgtccaatattaaaggggaaagttaatatctgccatgtgttgtcagatctaatttattaaaaagtagctgggagttcagacttttatgtgaggatcctgatttttaaacattgcaactaatgaaagaaagtctgtatgcagttttcttaatgcaggctaaataaaaccccctgcattttaactacctcacaaagccactaatttgcaaactctagactatcttaaatgaggaagcagttccctagtgagggaagggcctggcccagaaaaacctagaaaatgggaggcaaagaccaagcctttggactgctggccgtccactcacagaagaatctagaacccttcctttgaactggcttcacatccaagttgtatgggtttcctgttgctttcataagaattaccacaacttggccgggcgcggtggctcacgcctgtaatcccagcactttgggaggccgaggcgggcggatcacgaggtcaggagatcgagaccatcccggctaaaaacggtgaaaccccgtctctactaaaaatacaaaaaattagccgggcgtagtggcgggcgcctgtagtcccagctacttgggaggctgaggcaggagaatggcgtgaacccgggaggcggagcttgcagtgagccgagatcccgccactgcactccagcctgggcgacagagcgagactccgtctcaaaaaaaaaaaaaagaattaccacaactttagcagcttttttgttgtttgttttgagaccaagtctcactgtgtcacccagactggagtgcagtggtgcaatctcggctcgctgcaacctctgtctcctgggttcaagctattctcattcctcagcctcccaagtaccaccacacctggataattttctaaaaatatttttagtagagacagggttttgccatgttgcccaggctggcctggaactcctggcctcatgtgatccacctgccttggccttccaaagtgctgggattataggcatgagccactgggcccagcccaattttagcagcttttaaagtaacactcatgtatgatctcacagaaggtcaaaagttctggtgtggcgtggttcccctggttttctgctccagctttcacaaggcctgaatcacagtgttggcagggctatgttgctttctcgagtccctttggatgaacccatttccaaacacattcagaatcagttccatgctttgtagtagtgaggtctgcattcccttgctagctgtctgctggggtcattgtcagcttctaggagctgccctcatgggctcgtgggttcgttccttcatcttcaaagcaaacaatggtgagtcaaatccttcgtatgcttcacatctctctgacctccacttctggctcatgtatgccctttctttctcctgaatctctctgacttttctgctttgcaagtttcacgtgattacattacattcactcagatagtgcaggatgatctcctcaatttaagatcagcagattagtcaccttcactctatcagcaaagtcccttcactcagtcagcaaagtcccttcactgaagcacgtagattaatgtttaattgaataaccagggcacaggaatcttggaatgggagacatctttagaattttgcctaccacacaagtcgagggggaagacatttgtaactcatatggtgcaaaactatatgcttttcccactgtctttctcaaaccttgtgaggtggacaggacagtttgatttattcccatattttatacatgaagcatgggactcagagaggagaagaggcttcaaccgtgatgacacagcagttctgaaggcagcctggcataccggaaagaacactgggttcggagtccagggacctacattatgacttcaggatgtccatttcttggccctgtgaacctgactagttcctatgctgttctgggcctcagtttccttatctgcgaagtgatgcattgagaactacatcacagtgctgttgtgagattgagaatgataaagtatgtgaatctccagtgcacagcacatgggccaccatgattgttcggtattatttatttatttattttaaggtatctgcagagccacagctagaacccagatttatttatttatttatttatctctctctctttctctccctttctctctctctctctctgtctgtctcccaggctggaatgcagtggcacaatctctgctcactgcagcctctgcctcctgggttcaagtgattctcataactcagcctcctgagcagttgggactacaggcgcatgccaccacgcctggctaatttttgctttttaagtagagaagggattttgccatgttggctaggctggtctcgaactcctggcctcaagtgagctgcccgccttggcctcccaaagtgctgggattacaggtgtgagtccccgcgccttgccaaaaccccaaatttcttggttccaaatcttctttcatttgataaagctttattatgcaccagctgtgttccagattgtgtgttgggtactagagacacaaaagtgactcagacttgactttgaaaggtggactccattatgtcacataaaggtaccttgggcatgacacacaaaggccacccagaagtggtacacaaaggtgattccaacatgacacacaaaagatatttggacatgactaattttctcaaggaactcacattctggtcagaatagatacagagttacttccctgcgtactgtgaaggggcagaagctgaccaaggagagaaagagaaacagaggggaagtagggttaggtagtatttctagcagtctgccaaaatctgtcaaattttggagtttattttgacagtaaagtgaagccaacagatggtaacgaacagggaactgacatgattgatttataatttaaaaggatgccatgcagatgtggaaatgtgaaggggcaatggtggaaatatcactggaacaatggagtaatggaaattccactgtccttcctcagctgcagagccccctgcagagtctccttgtcatcttcctccaaaagttttctaggagtccccaaggagtctcctatgtcttcacaaacaggccccattcatctggtacctgcaagcatggaagctttactttttttttatggtggggatggagtcttgctctgtcacccaggctggagcgcagtggcgcgatcttggctcactgcaacctctgcctccccagttcaagcaattctcccacctcagcctcccgagtaactgggactacaggcatgtgccatcacacctggctaatttttgtacttttagtagagatggggtttctccatgttgcccaggctggcctcaaactcctaggctccagcaatctgcccgtctcggcctcccaaaatgctgggattccaggcgtgagccaccacgcctggcctaggagttcacttttggctagattccctggtaaggcattttatcagtttcccaactagcgtgacaatcaaatggagaagagatatggcagtgggctgtgtggggttgttacaatagctccacagggtcatcagaaaaccaggctccccatgttgttgtcagtgacatccccagatctctagctttcattctcacagttgtctcatagtcgccaggtggctgcaccatctccagcatcacgttcatcttccaggaagtaagaagaggaaggtgaggaggaggaaatgatggtgctagtgtcagaaaagcagaactcccaaaactctccagcagatagcctcttaagtttggtatttttaagtagacaagtctctcaaaatgtgcgctcagtaatctagtggagttaaagatttcttttatttatttatttatttatttatttatttatttatttatttatttttgagatggagtttcactcttgttgcccaggctggagtgcaatggtgcaatctcagctcactgcaacctccgcctcccgggttcaagcgattcttctgcctcagcctccccagtagctgggattacaggcgcgcctgccactacaccctctatatatatatttgtatttttagtagagacggggtttcaccaggctgatctcaaactcctgacctcaggtgatccacctgcctcagccttccaaagtgctgggattacgggcatgagccaccacgcctggccaggtttttatttttatttttttgcattgttcatgagaaagaagagtacggtcctacagattggtatacaatttaggaaaacagagatgtcaattacaatgttattattaccagagcaagaaatcatcaaataagacaacccgtcagaattccattttatttggggatcattttcataagacatggaataatttctaacatctttgtagtctcataagaccatttggtttaaattattcttccaagagcagattcgtattaccaaagactagaacaagtcagcaaccgtcatgaatattcatacaaaactgtatattgcagaggagaacataaatgatattcttataaacagtctcagttttgcacaacatcaaatcaaattccttgaaccattttataacacagaacaatatcttttgatttattgctgcaggggcaggaaacgtgtccttcaactctttctgagagtcatgtactttattatgaaaatttatgtttttaaaaccaagtcctggaattttattagctagtattacatgaaaaaaaaaaaaaacccttgggagctcagttgggatggcaaaaaaaaaagggagaaaagctgaataggcttttattcactgatagtaatttgataacatttttcttctccttggctcactggccagaactctgccatatggccaccctagatgaaaatgaaacaagaaaatagagattttatttttcagattggtggcttgatcacctggacaaatttgaaataacaaggaggaaacagaggttgaatatcaggtaggcaactctcagggtctacctgagatattgccctagaggagatggatagctagggctgctgaagacagtctgagagaggaggcttctttctggttgtgagatccaggagagaacttccaggaggaggttacatttgacctggacttggagagagaaggagggtttgaatgtgggcaaaggacagagctgcagaaggacgccatgacacggggagtggcctgagtaaacaggcggaggaaggatgtgcggagcatctgtagaaaggatccccatttcagccggtgcattggctcccgcctgtaatcccagcactttgggaggccaaggtgggcagatcacccaaggttaggagtttgagaccagcctggccaccatggcgaaaccctgtctctaccaaaaatacaaaaattagctgggcgtgctggcaggcacctttagccccagctactcaggaggctgaggcaggagaattgcttgaacccgggaggcagaggttgcggtgagctgagatcgcgccactgcactccagcctgggtgacagagcaagactctgtctcaaaaaagaaagaatgacagggtgcaggcatgggggctatcgaggtaagggaaaagcggggcaaaatcagggagagctcgaatgaaaggcaagggagtttggaatgtatcctatcagccgctgaaatattgtttatttctcaaatatctctcttaaatatatcaccttctctttgtcccccatagctattgttgcagctcagacttcatcctctttctcctggactgttgcttcctcctcactgcagacccagaggaacctttcgaacacccaaacccgttctcccatggttcaaaaccattccataatttccatgacttcccccattgacgtgggagggagtccgagctcctcagcttggcatttgaggctctttgaagaggtaatggagtgggaatgcagactagagacaggaaagcagacatggtgttgaggcttcacaaagagcgtgcggacaacccctgttcttttgtttctgaggcagggtctcgctctgttgcccaggctggagtacagtgttgtgaccacagctcactacagcctcaacctcccaggcacaagagatcctcccacctcagcttcctgagtagctggaactacaggcatgtaccattacacccgactaattttttttaacattttgtagggagagggtctccctacattgcccaggctggtctcaaactcttgggctcagcctctcaaaatgctgggattacaggtgtgagccactgcgcccagcccaaactctgttcttgaagctccccagcatctggtcccatcaggcccctaattcacaagattcgcagaccttaggggtggattgaaaagacaagagcccctagcaagcagtggacttctttctagcctcaccccatgcttcttactgctgcccctctcctcatccattccaaatcctgccctccaggacagaccaatctgaggtcagagttagcagcaggatacatcctggtcctctcttgcccctgagatctcgctggggctgatggcactgccactgctatggttgggtaagtagaaggagaggcagcatggaggtgtcttggggaggtaagggtgggtggagttggaaggcagacagggctgaggtaagatgaaggctgaggtaagatgaagtacctaaaaaattaggtacttggccaagcacagtggctcatgcctgtaatcccagcatgctgggaggccaagttgggcagatctcctgaggtcaggagttggataccagcctggccaacatggtgaaaccctgtctctactaaaagtagaaaaattagccaggtgtggtggtgggcacctgtaatcccagctactggggaggctgagttgggagaatcacttgaacccaggagtgggtgttgcagtgagccaagatcgtgccactgcacttcaccctgggtgacagcaagactctgtctaaaaaagaaaaaaaaagtagaatctttattctacaatatagatcctcaaaaaaccctcagtctttgaagaccagagttcaggttcaagctctaccaccttgagtaattctcttcagtttgctcacctagacaatggggtgttccccttctacagagcaaaaggaaatttatttgtggaaaccattcaaccacaacaatcctagctttcacaaggctgttggggaggggagggagttccaaatgagctaatgggtggtgagcacaattattcactaacggttcactatgacatggtctcttgtaatgtaatgtgactgaagtcaaaatctgcagttattacagagggccatgtgcctctgtagttatggtccttaattatcacaatactgtagcattggtattatcgtacccacttctctgattgagaaactgagattcagaaatgatacaacatgacccagatcacaagatacggttaataccaacaagaagagcaataaaaaatccagcagactagattggggtggtgcagtttaggagtccccccaagatgcctctgattcagtgatccacaagaaggactcaaaactcagcagaactgttttactcatgattgcagttgattatagcaaaagagtacagatgaaaatcagtacagggaagaggtgcatagggcagggtccaggagagagcaggcatgagctttcagctgacctctcccagtggtgttgcaccaatagagcttacttctttctgcaacaatgtgtggtgacatgcacagacatgccaagtagagaagtgcacccaagccttggtgtccagggtttttattgtgggtctggtcactgacttagcttagtcttcagcccctccagaggtcaagctgatgccccaggatccagggctcccaccataaatcatagtgttagcatcaactgatgaagtccaaggtcccaggtaaacaaagacactcttatcaggcaggatatcccaagggtttagagatcacctcataggagttggacaagtgtcaagcctttcttaggtaaggtgactcttttaatgcacagatataatacaggagtatgctaggtgggtctgtttttcaacttggatctctccttacagggctactttctcatgttttgatggaagtcaagaagataccagtggaagaggggctgtgcactacaatcccttgtgcatttgaatttcccaaagaacccccaagcaattccatgatcatgcactactggctcaacaaaaacatcagctccctggtagctacaaataaacccaatgctaccattggtgataacaccaaggacaaattttacatgactgggaatcttgatgaagaagactgtaccctactcatccacgatatactcaaagggaacagcataatatatttattctacgcagatctaggagaacaaaaaagtgctttcctgggggagaatatcaaactttttgtgtcaggtgatgttcaatatcatccgataagtggtttggaaagaaggaaatccaaaagtggttctggtgattatgtggtttttacctgatgggcactgggctttacaaaaccttaggtatttgagttttataatgatgcaatgagatcagtataataggtaactttacttttccaaatagaaatggcaaagagagaagcgattcaccctatatcatccaaccagtacaaaatagagaggaaatgatcacagattgggctgggaaggggcagagtctaagggagaactgggctggaaaagggagacagagtaggagctaccactagcacatgtagtctaggactcaggtaaggggtcagaatgtagaatcctcattctacaatgtagagcctcagaaaactactcaccctcagtctttgaagaccagagttcaggttcaagctctacaaccttgagtagttctcttcagttttatcacctggacgctgggctgttccccttccacacagagaaaggaaatctatttgtgaaaaaccattaaaccacaacaatcccaggtttcacaaggcggttggggaggtgagggggttgcaaatgagctaatgggtggggagcactttgtaacctggaaacgttgtgcatcagtgaagtgtccatgagggtcccttttcccccaaggtttgggtctacttctctcttctccagagctaacccaaaagccagagctccacatgccagagattcttttggctgagaagactgtgaccttgaactgtaccctcaaaggcacctgcaaagaaaccaaagccctcttccactcccggaagaacccagccatctccagcagctcctcctcggtgctgcacttcaccctgaggcctgaggaccatggcaacacccttggatgtcacttgaacttatccctagccaacgtgaccagaagtagcttggtcaagctccaagtggtctgtgagtgctggtgggcacaggcaggatcctgagaaatagtgggctcaagaaaagacctgagccccagagggagagaagtcttaggagctgtcacatcttccccctttgggaagacctttggggctgaaaggccagaggtaggagctgagcccaagtctgaggcagatgtggagagaggatgaaaggggactgttttgagtcccagccccactctgggttgccagaaagtctttctgaagctccctgtgaatagcaagtaaagagaaggctgggtcttaggggaagtagagaagcaaagtcaggacatcttgatgatccctgattcttcctctgcacagcacctgccaggttgttcaattcctcttgttccttggagaagacagttctgtgcagctgttccttccacgggatccccacgccctccgtgcagtggtggatgggaggtgtccctgtggctgtgaacagcatggataacatcctccgggtgacttcttccacatgtgccccctgggccaacagcaccatcagcctcattggggagccagaaagagtcatgagacttcactgtgaggggaagaaccaatatggaattcacacttccagcatcttcctgataccaactgagtatccagggacctagtgactgagctggaaagaacacctaaagaccagatgcagatgggcacagggccggaggaaagggtagagagttttagctcagactttaaagcctttggagaaaggtgaatctcacttccctccaattccagataagaaatcagtttccagtgtgttcgtgaaaggattaatccagggcattgtatatggagccattgcattctcattgctcttcttctgcctcatcctcttgtcgtgagtatcaaagttcaaattcatcagcagcctttcccaaagcctactacctttatttatgttctccttttccttcctcatactttcttccaatttattttgctttgtctattttttttttttttttttgagacagggtctccctctctcacccaggctggagtacagtgggtcaatcacagctcactgtagcctccacctccctgggctcatatgatcctcccacctcagcctcctcagtagctgggactacaggtgtgtgccaccacgcctggctaatttttgtattttttgtagaaataggatttcaccatgctgcccaggcaagtttccaactcctgggctcaagtgattgacccacctcagcctcccaaagtgctgttgggattactaggtgtggcccactgcccctggccttgtctaccttttaaaaatggattcttatatcgttaactttcagctactcttctttttcagtatttgtatttagggctataagtttccctctaagcatgactttagctgcatctcacaaattttaatataaatatttcattatcatttggttaacatatttctaatttccattatgattttttgactcatgagtattttttgtttgtttgttttttggtttggtttggtttggtttggtttggtttggtttggtttggtttggttttgagacagagttttgttcttgttgcccaggctggagtacaatggtgcgatctcagctcaccacaacctctgcctcccaggttcaagtgattctcctgcctcagccaactaagtagctgggattacaggcttgcgccagcgcacccagctaaattttttgtatttttagtagcggcggggtttctccatgttggtcaggctggtcttgacctcccaacctcaggtgatcgcctgcctcagcctcccaaagtgctgggattacaggcgtgagccaccgcccctggcctgacccatgagtttcttaggcacattactctctttttaaatttttagcttaaaccgaataaggtcagaaaatatactatgcatgatttcaattccttattttctttgtaacacattttttgtctcgtttttataaatattccatgtgaacttgaaaagaatgtatattttatgcctgtcaaatgcagtatatatatctctctgtgtgtgtgtctgtgtgtgtgtacacaatcacatacatatacatatataccctttaaatcaaattcattattcatgttgtttaaatcttctctacttggactgacttaattgcctgcctgctctaatgataagagatatgtgtttctaatctcccacaatgattgtggatttgtttgtttcttcttgaaattctgtcagtttttgctttctaaatcttgaggccatgtcattagcttcaagtctattttaaaatgtgcatacaaggccgagcatggtggctcacacctgtaatcccagcactttgggaggccaaggcaggtggatcacttgaggtcaggagtttgagaccagcctggccaacatggtgaaacctcgtctatactaaaaataaaaaattagccgggcatggtggcttgtgcctgtaatcccagctacttgggagattgaggcaggagaatggcttgaacccaggaagcggaggctgcagtgagccgagatcatgctgctgcactccagcctgggcaagagagtgagagactctgtcccccaaaaaaaaaaagtgcatacaagtatcttccttatatcagataccatttttcttcttcacctttgtattaaagcctattctgtcagatattagtatagctccaccagctccttcttttacatctactctcaatctgtgatctgaaggtttagttatgtgtttcataatcagcatatgattttgactttttttagtcttgtaatttttaaattggatttaaattaatttgcttgatgtaattactggtgcatttaaatactgatggtatttcaatataccatcctagtttgtcccatatgtttctttttttccctttacttgtcttcatttggattggctgggtatttttatcaatccattcttttctttctactagttgaaaattatgcaattatatgttttttaaatattcttttactggttacccagaaatcaccacatctatacttcagttatcaaagtatatatttgataatttcaaagtataaaacctttaccctcctccagataacataaagaccttagaacagttgaactctagttttcctcctcacaacttacatgctatttttataacatgctttgtggcattttatcaattccaatatacatgttatttcacattcgaacatctctgaaatagagatatgtcttcaaccgatggtgatttacagttgctgttggtctcaggtggcagtcctgataaagttgtcattgcctgcaggtgcctgaactcttgtcattgctgttcatattatcactgtaattgaattatttgttcattgatacatgtttaatttattgccttttcaaacatttgcaaaagtattacattattagctgccactgaaacaaagttatggtgtatacagaagggcacagaagtaaaagagtaagcataccttccattctgtgacacctgtaacatttgtttgagaaatgaccagaattccatattttttgtaaagcaacaatctggtgctttatagaacctaggaaagagagatacccacatgtggatgaagccatgttactttttcttgtaagataaaaagcaaaagggtaatttatctcataaactgtcaatgcaaatgaaaccagaaggaattgcttaatccttcggaagacatttttaaaatttaaattaacatgacattggatgattcatgtgctgttcaggactatgttagttcttaatagtttaactggcaacatttttttcccttagtgatatataaattatgcatcttactattaatggcattttattattaatgaaataccaattctatatttttgagcccccaaagacgtcatcatcatctttggttttatttcgtacattcactgctcattttgatttacatatatatttaccatagtctctattctttattccttacattctgttagtattctcagatcttccatccagaatcttttttcctgaaatatattctagaaagctgtttagaattggttttctggtagcaaacattcttggttttttctctcactttctctctctctctctctctctctctctacccgccccccgactctctctccctctcccttcatagttgaaagatattttggccagatgtggtggctcatgtctgtaatcccagcactttgggaggccaaggtgggtggatcacttgaggccagaagttttagaccagccaggccaacatggtgaaaccctgtctctactgaaaatacaaaaaacaaaaatagccagatttggtagtgtccacctgtaatcccagctactcgagaggctgaggcaggagaatcgcctgaaccctggaggcagaggctgcagtgagctgagattgtgccactgcactccagtctggaccacagagtgagactctgtctcaaaaaaaaaaaaaggtatatttgccaagtttggaatgctgcatcggcaggcattttctttcagtatcttgaactattccatgttccattatatcttgcttctattatcacaggagaaaagtcagccatgactctcatctgctgctcctttgaaaatgatctctccttatctgtctctgcctttaagacctctttgtctctgacatttccggtttggcctcacactttacactttcataacaccaacttgcctatttgtctgtgacacatgcgtttcttgtcctgcagctttgctgatatgtggcttctgcccaatactccccctcctctgcatttcattttctacccctgctcccctctcacacctggctgacatttactcatcatttaggactcaacctacagcccctccatcacatgctctggaaaacttccccgggcctctctccggggccaggtgtcttttcaggactcctgtaggtctcctggacttttgggtattagcactaacacttttactttgatgtgactgagtgtggatatcatttttttagatttgtctttatttatatttatttggcctcttcaatctatgctttggtgtctttcatcagttctggaaagattcttaaccactgtttatattgcctctgctctttgttttcatcatagggctctcatctaatgtttgtcaaacttttttatctgtttcccttcttaccctgtgtcctgtattttccagagagagggagtcaagtaaacaagtactaggttagaggtctgtatgagggagttgctaagagaaccctactctttcactgtctctccatccttggggcagaggtaggggatcagtattgcccagaaaatcctttagcttgcctctaatcaactccctccaacttcacactctgtcagtatgccaggtgtttccctctttcccccagtctcttatctcatcccgtcatgttcagcaataaggtttacctacttccaaggaaaaaatcagctccccaacacatacaacgttattaccattgacattgagtgatgtactccctgccttttttagggaaagaggctttcttcctcctgtccaaggtaagctccaccttctctgcttgggaatccttctcctccactgccttaggagctgtactccatcaatcatcccttctggctcctaaattttcaatcattctttctttgctggcacaaatctctcccgcctcagccccacaggcttcctctatgtactatccaatattctttcgagaaagtatcttacaccacttcctgattctcatcactcttccacttgctccccagcaccaggccactgacatgacattgtctaaagcaaccagttatccttattctcaatgttattctcaaaatccagtggcaggtgttctttctcttgttcacctttaggcagcatttaggattggggttggtggggtgaggatctcccacccagtggcttattttcatagcaaggaaagcatggcaaggctgtctgctgaaaatgacatgggtgggagcatggggaatccatggggaattgagaagaagtgtgatgtgttagggtggttggaatagccactggggagaatgagcaggatctgtataaggacaaggagagcaaccactgagcagtagccaaggcccattggttactggagattagtaatcgttaatggtggcaagcatcattgctatgtgacatctcctcccagcagcagtcattggaagacgtcttagtccattcagcctgctataacagaatacatagactgggtggcttataaacaaaagaaatttacttctcccagttctgaaggctgggaagttcaggatcaagtcaccagaagatttggtgtctggtgagggcctgcttcttggttcacagatggcaccttctggttgtgtcctcacatggtgtacagggaaagggagttatctgggctccctttataaaggcactacaatcccattcatgagggctacacactcccgacctaatcactccccaaaggccccagctccaaatactaaaacactggagattatgtttcagcagaagaattttggaggaacacaaatattcagactatagcagaaaaaaaggagtagatgatggcattggtctaggtttgagtattcatggacaagatgccaggaagggtgatggagtggggaggttggagacgggcaagcaaggaggctggaaggagaaagagagcgctttaactggggagccgttgtacctagtggggtggggagggaggaaaggaagagaaacagagagtcttcatagactctagaaaatatagtgtcttggaattgaagcttccacctgtgatatcatataatgggaacagttggaaggggagcaccaaaaaactggatggatagaagaactaggcagatcatgaggtattggaatttacattttcataagtggaaaagttttgggagataatgaacccttggtagttaaaggaaacagttgcattcatcaggtctcttccagttgtgagttataagggctgaattcaacaagctcaaagagaaagggaacagttctggtcatctgttgctatgtctctacccctgtcttagtccatctgggctactacaacacaatgccatagattgggtgttttgtgcgtaacagagatttatttctctcagttctggaagctaggaagtccaaggtcagggtgccagcaggttcagtgtctggtgagggctcttttccttatagatgacatcttctcactgtgtccccacttggtggaagggactggggtctcgctgaggtctcttttataaaggcttttgtctcattcaggagggttccatcctcatgaactaatcacctcccaaaggccccacctccaaatacgatcacttgagggttaggatttcaacatgtgaatttgagcggggggtgtaaacattcagatcatagcaatcccccaaaatacagtggcttcaaacaataatcattttagtatttttcatgatttcctagattaggaatttgggcagggcccagctgggtgattcttttgctccctgtggtgtcactggaggtcacttgagttgggctagcatggagaatccaaaatgctttcattcacaaaccaggcattttggtgtggatggccagaaggtgaggctcagctgggcccctctttctttccatgtgggctccgagtctctccatgtgctctcttccaaagcagaagctgccagtcctcttaaaggacaggcccagaatcaatagcacatcacttccacagcattctcttagagcaagtcacaggctggccaagattcaaaggaagaagaaatagattccacctgtccttaggaaaactatccaaggatttgccaccatttttaatctgctgtaggaacagattgactgttaagtctaaaggcacgtattagtttgcaggcgctgccataacaaaataccacagactaagtggcttaaacaacagaaatttgaggctgggcacggtggctcacgcctgtaatcccagcactttgggaggccgaggcaggctgatcatctgaggtcaggagtttgagaccagcctgaccaacatggagaaaccccatctctactaaaaatacaaaattagctgggtgtggtggcgcatgcctgtagtcccagctactcgggaggctgaagcaggagaatcacttgaacctgggaggcggaggttgcagtgagctgagatcatgccattgcactccagcctgggcaacaagggcaaaactccgtctcaaaaaacaaacaaacaaacaaaaacggaagtttgtcctcccagcattctggaggctgggagtccatgatcaaggtgtcagcagtgttggtttctcctgaggcctctctcctcactctcttactgcctcttctcatggtcatacctctgtgcacacacccctcggtctctccctcttcatgtaaggtgctatggtctgaatgtctgtatgcccctacccctgctaattcatttgttggaatcctaacccccaagatgatggtgtttggaggtggggccttgggaggtgattaggtcataaaggtggagtcctcatgaataggattagcgccctaatagaagagcccccagagagccatctcctccctttcaccacatgaggacccagctagaatttgctatccatgaaccaggaagcaagccttgcccagacgtcaaatataccagtgctgtgatcttgggctttacagcctctagaagtataagaaataaatttctgttgcttataagccacccagtctatggcaccttgtgatagcagcatggacagactaagaaataaggacaccagtcatataggattaaggccccacctgaacagccttcatttaacttgaggcgctatttccaaaaacagtcgcatagactatggcccacccataatgatctcatttaaccttaataaccccttaaaaggccctatctccaaacatggttacattctgagctactgggggttgagacttcaacatatatatttgtggggacacaattccacccgtgacaggcggatctacacttcaggcatgtctgaatccaggcatgcagatggcttcaccaagagtctgtctgtccccaccctatggctctgtttccttctggttaacgtgagctctggaggctctcttcaccttacaggcaagatggccagccccagattcacgtcctcctctcttagctaactccagctgacagagaacttgtcttctcgtggtgatttagcaatcccagggaagactgattggctctacctgagtcaagggtcgatgccacctctaacagcccatcccagctggctcccccaggaagggattccagccaccaccaacaaaaaggaactggcctcagaagctctgggagctgacatgtcggggtgacaattgggtctgtccatgggaatgtcaaaggcgcccaaaatgatgacagaaatctggggacagaaagactgagagtcaagcataaaaatcctctgggaatacagaggcctggcctagggggttgccagtgacagaaatgagaggaaggggatgttctggcccaatagccagaggctcaaagtagcagaaggagactctttcttcagaggatgagggttctaaaacagaagggtaacttcctgacgttgccatggcatctgtaacctgtcatggtgctggtgggggtgtagcagtgaggacgaccagaggtcactcttgtcgccatcttggttttggtgggttttggccagcttctttactgcaagctgttttatcagcaaggtctttatgacctgtattttgtgccgacctcctatctcatcctgtgacttagaatgccttcactgtccaggaatgcagcccagtaggtctcagccttattttacccagcccctgttcaagatggagttactctggttcaaatacctctgacaatatcgtagagcaaaccaggcctcagggaggtggacactgaacgaggacatatgcagatgtgtagggacaaatgttgggaagtgcctggaggaaaacggggagctgggagagagtgtggcaaggggacggggcggggagcagccttcaggtacttgctctgaggcctaaaggagtgtggggagctgcccagactgagggagccgcagttctaggctctgagattgcaaaggtttatcgagttcaagagcccagcagggccagatgagctcagagcttaaggagagcttgggagaggctaacctgctggcagagcctcaagggctctggtgagaagtttgggtttcatcttccctcgtggagggctattgcctctcatgcttggtcatcctggaaggtgagctgctctcagtggggactttacctgcaagaagcatatgcggacaatgtggtgggcaagtccccctgaaatgagttttgtgtgagttgcccaacagcgaaacacaccgggggctatttgtgttcattgctcactttgtcgctctctgatgcaaatctctataaatggaggcctcagcttctaagataaatacaaaaaggtttttttttgccaccgaaagcccaggccaaaatagacatgcttccttgtcattcccttgatcaatgactagattttttttctggcgccccccttgatgtgggggtgtcatatccaggttgctacctagtatggacccaaggccttgttgtctgctgtcactggaccatttaaagcaagtcccttggtaatcataacagcaagcccccgcttccccacaacccagcagtgtgcagccaaccctcagttgatgcgtggcctctgatcttcagtccccaacgtccttacgacctcagccccatcagtattttcggatgtttttgtagagcaagtgttttcagacaggaaatggacgtttgaatcttattgtctgaacgcagaaagaaacaatggaaggatctccatttggggaggaacaggtcgggtctttaaagcttgctcaggctgctctgcaggggacacgggacagaaggacacagccgccagccagggaccagcaggtggcccctgcagctgccagagcaagaaaggaaagggaacagttatataatccatgggacagccatacaacagaacaacacagctgtcagaaagagcaaggcgatgtgccgggcatggacatgcagacatgagccagcaatattcgaaggaggaagaaaggtgcaaaaaaaaagacctgtccaaaactgaaaagtatatatggagacatcgcagagcagcaagagaagcaggaatggaccagacacgaagggccaccaggctgaagggctgggctgtgtcctggggggactgggaagccatgggagggctgtgagcaggagaggagccgggcagctctgggggacagagtgaattccaggaggcccagaaagaagcttgggagagggtccacgccaagacaatagaggttcttatccccatttgacggcgtggggtggggctgtgctggtctcagaaccaggaagcggaggaagctggtgttctgggcccagcccagggctccttctgggaactggacggggcagggactgagcacagcattcaccacggggcttcctgccttagaatgaagatgcttacctggtgggaggagcatcagagtcccaaggccaaagaaggcttgccccttaagaaaccagagctgctggaggaaacagaagtacccaaaatgcctgaagctgacaccccaccagaccgggctggaggtaagtccctgggacagtcacaggcagactgtcaagcaacagggccgcaggccagggcccccaccccatcacctggcagaaccccggggaggcacttgttcaggacggagagacccaggccccctcgccccacacagcagatgctacatttgccaaaacaaagccccacagactgggcggcttgaacggcagatactgattttctccccctctggaggctggaaatcccaggtcaaggtgccagcagcagagcttccttctgaggcctctcaccttggccggtagatgctgtcttctccctgtgtcctcacagggtcatccctctgcgtgtgcctgggtcctaatttccttcccttgtaaggacaccagtcattgaattcaggcccatcatgtgacatcacttaaccttaatcaccgatgttaagaccttgtctccaatacagtcacattctgagtcactgggggttaggatgtcaacatatgaatgatggggggtggggtggatccacacttccgctcataacagaggcttaaggaggctgcttggattcccccgtgttgggtacttagagaggggattgggcttgtctaaggcagcggagcaaccgactgtggttctcccaaagtctagggctctggagagaaagaagagtgtagactccgagatggatcacggcatgcggcccaggacgtggaaacctggcccaggcagaggtgcgactccatcccagactccagacccagaggccgtcgcccggctctcacccatttcctggggaaacatgccccggggcctccccagcgccagccctcatgttagccaatgtaggggacacgcctaacacctgacacctgcccaagggacacgccaccccagcagccaggctgacaggagcagaaacaaaacacacagggatacgccaggcgggcagcaccaggaaacaggctgctgccgccacaggggccgctgtgagcccagaatggatccaacccagcctcagccttcttcagagagagaaactgaagcatgctcagcacgatgggaagtggctgaaaccctgaagaacccccaagagcacatccacggagacactgggaaccatgaggccccagcctctgcacatctgcattgcaaacagggaaactgaggctcaccgtgcctcgggccacactgcaaggctgtgcactgctcaggactccggaacccgggacccttgtcccccgctgcagcagctgaccctgtcctggacattttctcctgactttatgagactctagtgcagaggttgcaaactcagatgctcacagccaccaggcagggaacaagaggggcacagttggcctaatgggggccgtgtctgtcttgaaagcagctgcccctcctgaaggcggcggctcacagtggcggaactccctccgactcctccccaccccctccccacaggtcaggaacacggggagactacagctagctcttcatatttttttttgtttgtcttttgaggagaatccagagatctcgatttcagtgtgaaatatcttgattccggcacattagcaattgagaacatgtttttaaaaggcagcgccgcgtgggtcaaagaaaaaccctgatgagccttctcatttgcaaactcagatcagaggcatagatgtggaggggactcctgctccctgaacacccttcctgcccacagcaggcggggttattcagaacgcagacgctttgccaagggcaacaagaatccccaggttctgggaggaagcttgtgtgtggaagagtaaggagggatttctaggtagagaaaaacattccaggtgttcactcatgtcactcatgtggccacaaatccccggaggcctcctgtgtgccaggccgcgggctggggacaaagagaagtcagacccaggtcctgcccataagacctccaggttgttacacccttcgagcagggccagggctgtgtcccaagaagcatggggagaggggaggggaggaggagctggcattgagggagggagggcttgacccggctcggggagctgagtgttgctacctgagcccagcaggcatgcagggagaggtgacagcaccgccaggcacagaaagctgcaagattgaaggcaggaggcatggtgctggggggtcagagcactccagcaagggcagagcaagcagcatttctagggcaggaggcagacaatggtgagaactgagccaggcaaggggccacaggctgcgcctgggtaaagctccctgcaaacaggcctcaactgtcgccccgctcaccctcaggagaaacaagggaggagctgatacctgggggatcagcttccccctctctctgaaggacatgcacagtggtgacaatgtccctgagtttgacttcagtcctgatcccccaccaattgaaaggtcgtggggactaggagggtgacttcaggaaaaatgtggcatccatatgggtgggctgagggatgagcgcagcaggggcccagcagctccacagatacaggtgagattggaaagtggaatcatctcccaagaagtggatattgggctgaactctttccccagagtcaagggaaagacacaagagggcactccaggtcagacagacagatggggtctaataccaggctgtgtttccccgtctaggctgaggtcactgccggctcctcaagattccctgtagggaccagagggggctgagtccatggagcaaaccgctaattggccagtggtcagttgtgtgcatttgtacatctacaaggagaggatccaaggaggaggccatggcaggtggctctgtacaaacctctgttccctcaggagatgacggaagcagccgtgatcactgtcctggccaggactgagggtgacccaagccctcacaggccttcattcacttaagccagagaccctgtggaatcggtcccattatcatgcccattttacagaggaggaaactgaggcccagagaggctcagaagcctccctgaggttacgttcctaccttctgagacagatgctatccccctgcccttacccacaaggaagttgaagttcacaaaggggaggtccttccagaatctcacagcctggggacaaagccagatttgagatggccctgccctctcctgcctgctcctaggagcaaggcccatcaggatcacatcaggctcacttctccccattccagagtgcagactgtggaagggaactgtctggggccctgcagccacttcaggctttgctggctccaggagcaggtctaggctctccctcccattgaccctcaaagtctagtctctctgtctctgtttctctctctctctcaattccatgcactctctgtgtgccctgtaccctgctaaatttggagaatggctgtggatagggctgccaccatcccttcctctcccagatgcggattcccccaaccatgggacactgcagggtgggggggtccgtgggatcatgaacttcttctgcagtggccacttggacaacagagctgagccacctgtgtttacatcccagctctggccctgagtgtgggccactcccatgttccctaaccccagctttcacctgcaaaatgggggtatagcataccgtggatcactgtgaggcacagaggagttcatgtttattcaggaaccagctcggggttaagggcacggtgacggcagcctgtgtctgttgcacactgtgtctgtgccaggccatgttctaagcacattacatgggtcctcttgtttatatccatcagggttccaccagggaaacagaacgagtagctgatccttatacaaaggcttattgcatgggagtggcttatgtgattctgagagctggctaggcaggtgctatggactggatgtctgtgtctcgccaacatttttaagttgaaacttaacccccactatgatgcggtctggaggcctcggtgtggactgctacaacaaaataccatagactgagtggcttataaacacaagaaattcatttctcacagttcgggaagctgggaagtctaagacttcttatttcttctcctgggcaacctccattctgctcttaaggcctttttgggatgtgattaggttatgtaggtggaactttcatgaatgggattcatgccctaagatggccgggcatggtggttcatgcctgtaatcccggcactttgggaggctgaggcaggaggataactttagctcaggagtttgagaccagtatgggcaacctggcgaaaccccatctctactaaaactacaaaaattagccaggcatggtggcacatgcgtttggtcccagctactcggaggatgaggcaggaggatcacttgagcctgggaggtggaggttgtgccactgcactccaacctaggtgacagagccaaaccctgccaaaaaaaaaaaaaagacctaagaggccagacgtttcctcttctaccatgtgaagacatagcataaggcactgtctgtgaaccaggatgccggccctcaccagacactgaacatgctggtgcctggatcttggacttcccagctcccagaactgtgagaattgaatttcttgtgtttataagccacccagtctgtggtattttgttgtagcagtccacaccgagtaagacagcaggtgtgaagtctgtagggcaggcaggcaggaggggcagtctggaaactccagcagcagctgaagcgaaattctttcttttcccgggaaacccccattctgcttttgaggcctttcaactgattgaatcagacccacctacattattgaggataatctccttcacttaaagtcaactgattagagcaaaaacaacaacaaaaaggtaactatgagacgtgacggatatgttaatttgcttgacagtagtaatcatctgattatgtatatatatatatatatcaaaacatcatgttgtataccttaaatgtatacagcatagtcaactgattagagacgtcagtcacagctacaaaatccttccacagcgacatgtctcagtgtttggttgagcagctggggtctgtaacacagccaggttggcacataaacagaccatcgcactgctggtccccaccatggccctgtgaggtgggttctgagattatccccatcctgtagaaaaggatgaggagactcagagaggataaggagcccgcctgactgaacaaacggccgagacacctgagccagggctgggaacgccccttcctcacccccccgcgccacgtcccatccaaccttgctcagggaatgcttcagctgctattattagcaccaagctcggctccagggacatggcacaaaaaagaaaagtacatctcaaagtgggtaaccatacctgaccttgtcctaggaaacagagagtcggggagggacgtctttgaagatgagaagagttcagtcaatgaaagggataggaactaatttattctctcaaaaatatactaagggccaggcgcggtggctcatgcctgtaatcccagcactttgggaggccggggtaggcggatcgcttgaagtcaacgtggtgaaaccttgtctctactaaaaatacaaaaagttagctagctgggtatggtggagtgcacctgtagccccagccactccggaggctgaggcaggagaattgcttgagcctgggaggtggaggttgcagtgagccaagatcgtgccactacactcaagcctgggtgacagagcaagactccctttaaatatatactgaggctggctatgatggtatgcacctgtagtcccagctactctggaagccaaggcaggaggattatttgaggccaggaatttgagaccaacctggacaacacagcaagacgccatctctacaaaaaataaaaataatagctgggcatggtggcatacacctatagtcccagctacttgggaggctgagacaagaggatagcttgaggccaagcacagtggctcacacctgtaatcccagcactttgggaagctgaggcaggaggatcacttgagcccaggagtttgaaaccagcctggggaatacagtgacaccccacctctataaaaagtttttaaaattagcatgcagccaggcgcagtggctcatgcctgtaatcccagcagcactttgggagtccgaggtgggcagatcacctgaagtcaggagttcgagaccagcctggccaacatggcgaaaccccgtctctactaaaaatataaaaatcagcccggcgtggcagcgggcacctgtaatcccagctactcaggaagctgaggcaggaggatcgcttgaacctgggaggcagaggttgcagtgagccgagattgtgccactgcactccaacctgggtgacgagagtgaaactccatcatctcaaaaaaaaaaaaattaaaattttaaaaaagaattaattattttggaaagcctttgcatgaataaggcatgaatctttgaacacccctgagatttctaagcattgtgttcagtgggcttcaggccttgactcatgccctgcaaagccccctagcagaatggaacgctctccatgaataaagataaaagccaaagatggtgctaggtcagcgaggtcctggcctgaaaaagacagtcccctccagtgggatttcttaaacagactgtctaataaaggtacgatttgcagaggtgcgagcagtgttagggatgtagggatggtaaggatctcaggtgccagcaatgggaggagaagtttcctgccagattctgctgagtcctggaggaacaaagggaggaatggtatgaccgaggccttagtgagaactgggatcatggaagaggggctgctgatggcactgaggctcccaccttgggagcagcaggcagggaggaggggatcctccagccccttccagtattctgcctgtgcctccctttgaccaaacccacctcgaagttgaagggcaagggagcttgctgatggggtcagtagaggtcagcctcataggcagaggggatggaggagggatggtgtggtggactgaatgatggccctcagagacatcagtcctaacgcctggacctaatgcctgtgcatgctacctgataaggagaaagggtcattgcagatgtgatgaagttgaggctcttgagatgagattacccgggtttatccagctggtccctaaatgcaatcacaggtgtccttttctttctttattttttttattttttattttttattttttgaaacagggtctcactctgtcacccagactggagtgcaatggcaggatctcagctcactgcactgcaacctctgcctgggttcaaacgattctccagcttcagcctcccgtgtagctggaactacaggcacaagccacgcaatttgtcttttttgtagagacagggtttcaccatgttggccaagctggtctcgaactcctgggctccagctctcctcccacttaggcctcccaaagtgctgggattacaggtgtgagacacattgcccggctcacaggtatccttataagagggagtcaggccaggcacagtggctcatgcctgtaatctcaacactttgggtggcagaggcaggaggattgcttgagcctgggaggtcggggctgcagtgagctatgatcatgcatagctatatctctgtccattcaactaccatccagaccaagaagtaggacgtgcctactgcagaaggctcccttccacgtacctcctgctggatctccatgacatgtctcctcccggactctccccaaccagagtaattacaattctcacatctgttgccatggatcatttttgccaggtatgagacttcatataaatggaatcatacggtagtaatctcttgtatctggcacttttcactccacattatgcctgtgagtttccaccatgttttagcacgtatcaatagctcattccattttattaatgaatcgtattccatggtatgagtctatattaattcatttacacattcacctgttgctggatatttagctatcttcagtttgagacttgcataaatgaagctgcagtaaacattcatttgccagtctttgtggacatattgtttttatttctcatggataaataactggggtgaaattgctggatcataggagtgctcagctttagtagacactgacaaaacattccccaaagcaatcgtgcccatttacactcccaccaatgatacaagagagttccagcacttgttattgtcagtccttttcattttagtcattctggcagcagagtaagagtatctcctcatagttttgatttgatctccctgataacttatgctgaattctttttcatgtgattattattactattattttttggtctggagtcttgctctttcacccaggctggagtgcagtggcacaatcttggctcactgcagcctctgcctcccaggttcaagcgattctcctgcctcagcttcctgagttgctgggactacaggcacgtgccactacacctggctaatttttgtatttttagtagagacagagtttcaccatgttggcccagctggtctcaaactcctgacctcaggtgatccacccccttggccttccaaaatgctggaatgacaggtgtgagccactgcacctggcctgaatatcctttttttttttgtaaagtgcttgttcatgtcttttgcccattttaaaaatcaagatgtctcctttttgttgatttgtgagagttctttatatattctggatataagtttgttatcaagtgcacatatggcagatatcttctgtcatattctgaggatataggaagaaaactaaagttttcggctcactgcaacctctgcctcctgggttcaaacgattctcccccttcagcctccctagtgcctgggattacaggtgtgcgccaccacacctggctaatttttgtatctttagtagagatggaatttcgccatgttggccaggctggtcttgaactcctggcttcaagtgatccgcccaccttgggctcccaaagtgctgggtagagctgccaggccctcagcaggtgcaccaccctccaggaacctccatgtgttcagctatccagaagctctctgaacccagtccctttgggtttttaaggaggcttcattacagaggcatggctaattaaagcattggcctctggtgatgaactcaaccttcagcccctccctccttccgagaaattgggaggtgggctgaaagtcccaaccctataatcctgccttgacctttcttgtgaccagaccctatcctgaagctaccagccattagtcaattaattagcatacagaagacatcgctttggaggttccaagcatttaggagttgtatgtcaggaaaggggcaggaggaatgaagaccaaatatgtatttcacactatcacaccattcacccctggtctttggacatggttcccttataccaaaagaatatacaactcaaaagatactgccacgttactagaatcccattcaatcatgactaattggttcagtccatcatattgtatgaatgtctcccagagtaagaccactcaagtttgcagccttccattctatcttgtcaggttctaaaagcaggagtggtctctgcacacatatagtttcaccctctcaggcatctggtataattgagctaagagacaatgtcatcccatgttctgagcatctttcaaggtgttaacgtaatattagatttccttcattacataacccatttattcattcctttaccttcagctaccattcttccttctcttcatttatatacaaacttttccatctttgcaaggaacactgtgcttgtctggactgcaggcagcaatactagtctagcaagtacctgccccacaatccactcccattcagactgggtaaggttacacaggtgcagaaccagtgggctggtttcactaccagacaatatagctgcatccactattagccccagttttgccagatagggtggaggtacaatctgcctctatcaggcctttagggaattctgacaaaaaagggatatgaagagatttgttaaaggatgcaaaattatagctagataggaggaatgagttctagtgttctatagcactgtaggatgactccagttaacaataatatatagcttcaaatagctggaagggggatagtgaatgttcccaacacaaagaaatgaaacatttttgcaatgatggatatgtgaattaccctgattcaatcactatacactgtgtgtatcgaaatatcactatgtaccctgtaaatatatacgattattatatgtcaagtacaaaaaaaaataaccaacaaacaaaataacatagctacatttttttgcttaggaatcatccctgcttccagcacttgtagtttcaagacctggttctcgtcctagtgttactaacatgccaggggtttagtctagttcccattgctagatgcacagaaagccaacccctgagacaataagggttgccagggaagaagattttaactgggtgctgaagccaaggagaatgggaaatcagtctcaaattcacttctgacggactaaaactggggggtttatatagtggtgaaggaatgtaaaacaggaattagggaggagtaaggaagcaattgagaaatgagggatttagtctctcgttgtctgtgtggtataatctggtgagtttcagtcctttgcctgaaggtcagttccaaaggaaagaactcaagtgagacaaatgtaaatttcaaattttaacactaaaagggtcactttctaggtttattcaaaaactcagcaggtgagatggctcactcacacctgtagtcccagcacttctggaggctgaggcaggaggattgcttgaggccaggagtttgagatcagcctggccaacatggcgtgaccctgtctctacaaaaaagtttaaaacttgtcaggcatgctggcatgcatctgtaggatatgcaggaagctaaagtaggaggatcacttgagcccaggagatggaggttgaaatgagccaggtttgcaccactgcactccagcttggatgacagagccagaccctgcctcaaaaaaaacaaaatagtaaatgccacttctatgggacaattgggttggttttactaggaccactgcatcaggtaggagaaaaaaatgaggttatatctggaagaaagaaaaaaatatatagtcattatagcaacttggtaagaattgcatagccacaccagcattctccctacccccactttcccaggtcaaccagaaaacaggaaagtctagtggtgacgctcctctagtcccatcaggttgagtgtgagcacacaggagggcatgtaagccaaatcttcctgtttttttttaaatttttatttttatgggtacattaaaaaaaattatggctacatccttcatgcttttatctcccctgtttttgacaaccaaagttttaattgctcattccacttcttgatcaaattattacccaaaggacagctctctgcccattgctggacattatgggctagacagtgtgttccttggtcggaagaaatgacggcagcctgtgcaaatgtgtgtaatatattctgttctgattcttttacagcactctgagcatttgcatcttccactgggtaagcaaaggccagcccagagtcagcgtctattcctgtcaagacccatttgtagccccccagggctaccagcatcagcctcacttgccagctgtgcttgggaccttcccaccagggaatctggcccatagccatctgcagcttctgtctctcctgctggcaaacagaacagttcttattggcattatgtgcctgagagggtgcaatagaaacatatttagattcagcccatctctgcactgctgcagtgccctcatgtcctctcatttcatgcacccaggtggccacccagtgagcacacagggatatctgcttgtcgatttcaatcaccttccagacctggaagagagctcttctggtgggcattgacatgtcctaccttaaggacccctcaaatttccaaagggctgtgtgtgtcccatatggacatccctttaataggctaggtttccattatccacctgcttgactatatggccaagccattggccactgcctgtgagtcagtaaaaacccacacggaagggcttttaccactgttcaattcttcagcatgcaattcagctcactggacggatttgtttttatcttctttgatcagaatggcatccttctaaatagaacgtggtcttttcatcttggcactgtcatctgcacaccaagcagctctttgttggctagttgagagctgtttatagggcactgtccaagtggcagtaggatccagctgctccccatacgcttccagagtcagtccgagggagaaagaggctccttttttattagtatctcctccttgcattccctaggtagcatgatcctgtataaatcatttctaatttattaggggactcttctgggcattttaatctccattagagtgtttttaaacataatccaagagattattggtatttcaggcttcaagatcattttatgtcctcagtcataggggtagcttgaattaatatcccatagaaagtagtattatgctcttcaaattgaaattctgtagtccagagtctcagtagttgtcactggaaggtgcttataggctgttcccataggccccagtctgggttccatacagggctctgtctcagagaatttgtccatagcatcactctgtcttctattctacattttgtgggctccagagatctgactggttcctatttagcatgtccaattaatattgattaaaggcagatttacatggcttttgtttcataatgctaggtatgggaaacatttcccagtctgatacaacatccatccccataatataatcaggtaaaatcacttcagagaaaatgtgttcaaatataccaactctcctataaaggtttatcttaattccaccaaccctcactttcctaactgtagcctctattagaactttatcaatggtttttggtttcacaatactacaacccttaaatttttacattctctcaatctaatcccaagtcaggacttcaccaatggatgttggtaccatagtcagtggacctcccatatcaaggagtcccatgaatttctcttctgcatccctgatcattttgtccacttgtgtacataaggctttaggtccccatcagggcgttgagcaaaagaactcttgcttgttggttaatctttatcttgattaaactgccagactattgccccagaaaatttcagatcagatgtcttattttaatctttgctttctgacttttaaaatttctccaaactaaggtaaatacagcaaacttttttggaaccctttaatgttagggaaccaacaagtactccctttggcccacccaaccttaaatagtattatattaagacttttgttctaactccatcaatttctgttttactcatcccacttctgacaccaaatctgaggctatagggaagacaaccaaagtgctttttctattctctcacttaacaatcaacacttctcttttgattggtgtcaccaagaattgtgtagggatttctccccaccagcaaccaattaatcagttctgcagtggacacgaattgggtgtactccaattcaatcctcatacatctacctggacttcacagcagatcccacaagttgagggcttggtcccacaagactgtcccccacttccaatgccaattgtaggctccaggttctttacctgtgcttctgactgaccagctataaattggggttccataacacctttctcttcaattaattttttagagcagctcaaagaacttagaaaaacacttatgcttaccagtttattataaaggatattacaaaggatacaggtgaagagacgcacagggtgaggtgcaggggaaggagaatggagttgccatgccctctccaggcatgccaccttccaggaacctccgtgtgttcaactgtccggaagccccctaaacccagtcttttgcggttttttaatggaacattcattacatacgcatgattgattaaatcattgcccattggtgctccacttaactttcactccctctcccttccacagaggctgggagatgagctgaaagtcccaaccttttaatcatgccttgttctttcctgtgaccaacccccatactgaagctacctggggcttgccagtggacgtagcgggggtgttatgaagaccaaatatatatttcacagtatcacacatttatagctcttgggatgtaaaaaattctccatgtctctttgtcctcacctgtgaaatagggataaagataagtgctgcctcagaagggtgtcatgatgcttcaaggagataatatgtacaaagtgcttagaaagatccctacaccgagtaagcactcatattttatcaggcatgggatgggccatttcaggaagagggagctcctgttctcatcctaagtctgaacggtccggaattcaaagaggatcaataaatggcctttcaccaggatcacaatggattttgtagagtggtgggctggcaagctgattcagtgttcaccattgctgtggtgtaaatcctcccaacatggccagtttcaagctaataatggtttaacacctggcttgcacaatttctgaaaatttaataatcagctcttttgagccagtgcaagccacctgcagaacaccattaacttttgcatcacccagttttgtgaacgcaggcaggtctcttcctccctctgtatcttacttccctccatctctccaaacggagctaagccatccgactcactcatgcagtacgtatttatttgagtacgtactacatgtcagtcactaggttgggctctggaaatccagccttgaacaaaagcagaccaaaacaaaaacaaaaaactccgtgaagcttacattctggaagtgggagtagggggagagcaactaaaaataacagtgaaagaaggaaatcggccgggcgcagtggctcacacctgtaatcccagcactttaagaggccgaggcgggcagatcgcctgagatcaggagttgaagaccagcctgactagcatggagaaaccccatctctattaaaaatacaaaacgagccgactgtgatggtgcatgcctgtgatcccagctgctcaggaggctgaggcaggagaatcacttgaacccaggagttagaggttgtggtgagccaagatcataccattgcactctagcctgggcaagaagagcaaaactctgtcaaaaaaaaaagaaagaaagaaagaaagaaagaaaagaaaaggaaaaggcaaaagaacattgttagtgctatgaagaggtatgacgtagagttattgtgctgggagtagcagctactttggaaactatgatcaatgaaggcttcttaaaggggagaagatgagccttaaataagaaagagtcatctgccagtgtggtaggaagagcattccagcgaaagaacggcaagtacaaagaccctggggctggaattgttcggtttgtttaaggaatggaaagaaggtcacagcgagctgagtgattgaggcagggagtggccctagctggtccaggtgtttagtggtggttgttctgaaggtggaggcaaaggtagaggccaagagagtagagcataggctgctacagccagagtcctacagggagaggtggtgaaagctcagaccaggatgggagagtaagaaaaggacaaagcagagatttgttttggagacagagccagcggttcttgcagacaaattggatgtgagtggagggggaaggaattgaggatggatatgtttctgaggcagaacagcccctactgggtaacttcaaaagctcctgccttgaactgctacagaaataacgtagactcagagattattttgctcctgcgtatgccaaggggacgggaacaggagggtggaatacacctagtaaacagatgcaaagtggaaaggggagggagaaactcactacaggtttttgaggtgctggctggagccaggagctgctccaagatctctcattcttctcaataaccttgggcaatagggaattttccaccttgcaggggaagacgctgaggttctgggaagagaaatggcttgtccaaggtcacacagccaagtcagtgaaagaacagggagccaggatgttttgcacctaaaccctggattatggtttcctccccacctgctcccccaagataagtcccccaatcccttcccattgccttattatactggggatgagggttggggtggaggaaaaaagcaaatttcactccaaaagtcagtgttttcgttatccatgaaaatagatggaaaagctgaactgtggcccacaggaagaggggcctgggggcctggcctcctgggtctgagggaggagggggctgggggcctggactcctgggtctgagggaggaggggctgggggcctggactcctgggtctgagggaggaggggctgggggcctggactccagggtctgagggaggaggggctgggggcctggactccagggtctgagggaggagggactggggacctggactcctgggtctgagggaggaggggctgggggcctggactcctaggtctgagggaggaggaactggggacctggactcctgggcctgagggaggaggggctggggacctggactcctggctctgagggaggaggggctgggggcctggactccagggtctgagggaggaggagctgggggcctggactcctgggtctgagggaggaggggctgggggcctggactcctgggtctgagggacgaggggctgggggcctgggctccagggtctgagggaggaggggctgggggcctggactcctgggtctgagggaggaggggctgggggcctggactcctgggtctgagggaggaggggctgggggcctgggctccagggtctgagggaggaggggctgggggcctggactcctgggtctgagggaggaggggctgggggcctggactcctgggtctgagggaggaggggctgggggcctgggctccagggtctgagggaggaggggctgggggcctggactcctgggtctgagggaggaggggctgggggcctgggctccagggtctgagagaggaggggctgggcctggactcctgggtctgagggaggaggggctgggggcctggactcctgggctgagggaggaggggctgggggcctggactcctgggtctgagggaggaggggctgggggcctggactcctgggtctgagggaggaggggctgggggcctggactccagggtctgagggaggaggggctggggacctgggctcctgggtctgagagaggagggactggggctagtctcctaggtccatgggaggatgagattgggacttgaaggaggagggagctgggttttaggaagtatcccagactccgtgttctgcggatgtggtggaaagacgtggggacgcctggggcgggaggggtaggggccgggccgcagtaacaaaggcctctccctccaacaagcaacccccccttgaccccgcctccccggccccccacctctcctgattggccggtctccctgcccgtcagcgccgcccccctccccgggtctgcagcagctccagccgcctcgtcgcgcccccccagccccctccccccgcccccgccgccccccgggccggtgcagcgcaggcggggtccccctccccctcccccctctccccccaggcctcgcgcgccccggaccggccccccctttcccctccccctccgcgccgcctctgccgcgatgcccccccctgcgcccggggcccggctccggcttctcgccgccgccgccctggccggcttggccgtcatcagccgaggtaccgcagcgccgggggcggggggctcggccgggacgccagggtcttgggtgggtaatcgggggatcaggggtgggggtcgagggctgcatccctgggccggcgcggggaggccccgggacgccggggtctgggcccgggggtggggtctgcattccctggctgggcagggggacctcggacgtgggggtccgcgccccggggcaggggtcggcgtcctcgggccggagccgggtctaggggcggaggtctgcttccccgagcaggcaagagggtcgcagacacctagccctgcctgggggcaggagtctgcggctcctgttgaggagggggcagacactggactcggggtccccgggtcggatctccgaactgagttggggtggggggcaggggataatgccctgttaggggtcttcatctgtacgtggagagggtccctgaagaggtccttgccgggggctggggtagtcatctcgggacagaggtcaggggatggatgccttcccagggtcagtaagaggaggggacaagggtgtccacagacctagtcccagggtcaggaaaagaggggaagggtctgaaatcccccagcagggtcatctaggttgagagaaagtgttggtacttggggaggttgcagttatgtgggggagaagggagctggagatacaggaagttggggtgctgggctggggtcttggattcccaagctctgattgaatgtctaggttcgtggggctggacagtggaagagcgatgggcatgggaggatgaaggaaagacggaagggaagggttaaagcaggttgaagggttaaccccggcccggcccggccctcccagttggggagagggccaggggcaggtttctgcactgaggttagatagctggaccttgagtctccccagtagggcctggcaggcagggggtggtcaaggagattcctagatttccccctaagaaaagggaggagagtgcaaggaggcaggaggctggagggtgggcgctcaggagggcagggagctgggttaattcagactttctggaggattcccccaggccctcccctgaacaaagagttccagggacaaccaagaaccccgacagagtccccaagagtctcagagaggccgcccgcatagaccaagtctggcacagaaaccccgtcacagcgtcccacccgaagcagcacctgcagacaccagtcacacaaacacagccccatccacgcaggacgcagggacctggtgggccacagcctcagtcccttgctagtcctcccccgtctcccacctgaccagtctgaatcgccctctgactttctgaccacctgtctctgtctctgtcatgcatctctttaggtctttgtgtccctgccatttctggaggttcccatcccttcccatctctgttatccactgctgactttccacctgcctctgtctctgggtcattgtctctccatccctgctgctgacagcacagttccacatctgtctgtctctgcttttcagactgttgcccattgcatgactcagtctcttgatacttgcttgcttcctcacttatgccttaatcttcattaacttctctcatttccttctctcattcatttccttcttgttctgacctacctttctcttttttctttctctttccttctttctctttccttctttctttctttccttctttctctttttctctctctctctctttttctttctttctttctttctttctttctttctttctttctttctttcttctttcttctctttttttctttctttttcttgtttttttgagacagggtctgactttctcacctaggctggagtggagtggtgcaagcatacacagctcactgcagcctcaatttccctgcctcaagcgatcctgccacctcagcctctggagtagctgggaccacagatgcacgccaccacacctggctaatttttaattttttttctttgtagagatgggggtctcactatattgcccagactagtctcaaattcctggcctcaagtgatcctcccacctgggcctctcaaagtgctgagattacaggtgtgagccactgcaccagccacctcttctttctttctctccttgtccttatctcttgtcttcttcttcctcctcttctttccctgatcctgtaccctttgtgacctttcccccactttcctgtttcttctctccctccccttctctctctcactgcaacttcccatttttcacattcactattttttttttttttgaggcagagttttactcttgctgccaggctggagtgtagtggcataatctcagctcactgcaacctctgcctcccgggttcaagtgattctcctgcctcagcctcgcaagtagctgggactacaggtgtgtgccaccacgctgggctaatttttgtacttttagtagatacagggtttcaccatgttggccaggctggtttcgaactcctgacctcaggtgatctgcccacctcagcctcccaaagtgctgggattacaggcatgagccactgtctggcccccacattcattcttaaagtccctataaatcattacggggctagactggggcaggaagctgtggcagagccaggaggtggcttgtgaccctgctcaagtcttttcccatctctggtcttaggttccccttttgagaactggggacgagaggggatggggtggggttgagacagaacgagatgccagaaagacacccccacccacccatggatagtttgagctgtctgggaaaaaaagcttatggcaagatatgcaaactagcatcttctctcttcttttattcatgatcttgtccaagttacaagaggaatacactgcaaacagtccgcctctgataagggcaaaccccattgtgctcctgccctgccaccactctcacaaccactgtcttgagagaaccggtctgtggctggagtgcatccttccatagctttctctcacttctgcagacttagacacgacacacagaggacaacataagtgatggattggttggtttgttgatttttttcccccaaaatagaaacaaaataagcccatttctctgcaatcggccttttcccacttaaccatacctcccttacatccataaatattcatctatcttcaattcttttctaaatcttttatgccaacacacacgcaccccctcacatatacatatttatttacaaagcagctacattgtggtattttaaaacaattcaacaaaatcaaatggccgcttctgcagcagcaaatgaggtgggtggttcctttgcttctggggcagctagcagagtgatgatggtcaggagggggcaggagccccagatttgagtcccagcactgcccctgacaagctagctctccccaggacctctgagctccaggttcatctggcttgtgggctgtgcttggttgttggttcatatagcaaatgttcttggggaccagggccgctattctagacactggatatatacatatggcagtgagtgaaccaggcagtcactgtcctcacggagcttagatcatagtgggatggagagagatcaaagaccaaaaccaaaacctaaagacaaacaaataaaagataatttcagagagtgatgagtaatgtaaagaagataaaagtgacttggcctttgaagctcaagtggttgaggaaaccatctctgagcaggggagagtggagttaagacctgaaggaagagggaagtcaacctttttttttttttttttttttttttgagacagagtcttgctctgtcgcccaggctggagtgcagtggcactatctcagctcactgcaagctccgcctcctgggttcacaccattctcctgcctcagcctcccaagtagctgggactacaggcgcccaccaccacgcctggctaattttttgtatttttagtagagatgggtttcactgtgttagccaggatggtctcgatctcctgacctcatgatccgcccgtcttggcctcccaaagtgctgggattacaggcgtgagccaccacgccccgccggaagtcaacctttcaaagttgacagcagaggtaaagaccttgaggtgggaccaacagaaaggagggtaaagctgggcgcagtggctcacacctgtaatcccagcacttcaggaagccaaggcaggtgaatcacctgagctcaggagttgaagactagcctgggcaacatggggaaaccccatatctacaaaaaaaaaaaaaaaagccaggcatggtggcacgcaccagtagtcccagctactcaggaggctgaggcaggagaatcgcttgagcctgggaggtggaggttgcagtgagccaagatggtgccactgcattccagcctgggtgacacagtggtaccctgtctcaaaaaaaaaaaaaaagaaaagaaacaaagggaaagaaaaggtgtgtctagtttcaggattcttggcacagtgtctggactcccctggtgtcggtgacgctaatgccctcagattttttctttttttttctttgtttttcttttcttttcttttctttttttttttttaagacggagtctcgctgtgtcacccaggctggagtgcagtggcacaatctcggctcactgcaacctccgcatcctgggttcaagcaattctcctgcctcagcctcccaagtagctgggactacaagcacatgccaccatgcccggctaatttttgtgtttttagtagagacggggtttcaccatattggtcaggctagtctcgaactcctgacctcaggcaatccatccgccttggcctcccaaagtgctggcattataggcgtgaaccaccatgcccagccaaccctcagaactctgaggtcagcaaagggaggaggaccctcctggggactcctgggtgccagacataacaggcccagccccttctcacagcctttcccagccagagccgcaccccctcctccctgccccagtctcatgccccgcccctccaccccctacctcccaggtttcccacctgcgtcttctgagactgtggaatcagagtatcaccctcccgacccctgccaaccatttcagggttccagctttgcctaagctccttggcagggcggcagaagattctcacccccagcccaaggtcactcagcttgttagggatctctttctgtcttaagaaaagtcacctgcctaccaccttcattcccaggtttatcaaacaggtatgaggcctgtgcgtctggactgtaaatcctacgagggcagggaacaagtgagccctctgatcaccgccagacacctcccttgccacaggccggtgcctgccacataatcaccctaacagccagctcacggacggctgtttgcaagcacttaactggcaggcactgtactagaacctttacttggattacctcttgtaatcctccccacaacccagtgaggaaggcatgattatcatttccatttcaggtggggaaactgagtcccagagaggtgaagtaacttgtgtggctcagcagcagagctgggacttgaacccagctgcctggcagccacactgcattccctgggccccctggttatgcaaggttggctttatcagtagatgcttaccagggtgtctgcccaggagtcagtgactcagagcaactgacagcccagatacagccctgccctccccgctcccctgagtggagcatctagggagacctatgccaagccagggatagcaatagatggttcctaaaaaagaaggtgctgttaggaaccgctagcatttattgggttctttccgaatgccaacagctgagctagacacttctgcttgcatattctcacggaatccctcacagaaacccttgcagggaagaactactatttttcaccttgtacagttggagaaactgaagctcacactggccaggagtgggggtcatccagctaggaagtggtgggacagacgtttgatcttccaaccctagctcctcagggatttattatctggtctctgaggaccatccatgccctttccacaaacacttcccagttctgagattggctcgaccctggggggacacagctaagattcaagccatcacaaagctcctcatcactgtctcagctaagtcaaacagtgcccagaagaaggagtgggagctctgccttgaacagtcagaaaggtcctcctggggcaagggacatttgcattggggtcttgaagaatgagtaggagttcaagagttgaagagtgttgcaggcatccatttatattcatccattcaacaaatatttcccaaggcctctggtgggccaggcccagtgttgggagatgctggggacacagacttgagtcagaaccaagatttacccccaagaaacttctagtctgatagggaggccagatacagacagtcatcagagtgcaatggacaaagtcctgaggcacccggagtcctgccttccctgcagggtccacttcccaccccagtgaccagataataaagccctgaccaggcactctggctcacgcctgcaataccaacatttgagaggctgaggtgggaggatagcccaggagttcgaaaccagcctgggcaacatggcaagacctcgtctcttaaaaaaaaaaaagtagccaggtgtggtggtgcatgccaatagtcccagctactcgggaggctgaggtgggaggattgcttttgctggggaggttgaggctgcagtgagccatgatcatgccactgcattccagtctgggcaacagagcgagactctgtctcaaaataaaaacagaaataaaaaataaagccccaagaagcctggagtggtgtgtgggctcaactcatgggggcagtgcctgcttcaatcagcagctgagttcaggagccctggagcccctgaaccttagggtaggcaccttggacagctccctcttccccccacttcttggttcctgtaggacaatggctctcaacggggaagggggtgtgtgattttgccccttacggggcatctgacaatgtctggaggcatttgtggtggagaagggcatcaaatggatccagatcagaagcgagacgctgccgacctcctatgttgcataggacagtctggccccaaatgtcagccgtgctgaggtttaggaaccctggcccagaaggtgtgtcagcaggagcatagcaaatcctgtgtgtctgggggatagggcagggtacgtgcctgtctgttttcaccagcctaggaagggatcttggtgcgtacatgtgactctttggcagcactgaatgtggcactacccgtcgttcggtccaggtttttgttggtgactttccaattccctgtgtgtgtgcgtgtgtgtgtgtgtgtgtgtgtgcgtccagccgtgtgtgatctgatcacaggagacaacatgacctgattctcggcccagcgtggccccttcgtgcttgaggggatgtgacagtgttgctgtcttgttacacgggttgtagctttgtgtgcgtctgacccagggccttccaaagtgcaaagttgggaatcatggtgctcgcaccagtggtgtctgtgtaaccagttaggttagtaagcgtgtgtgtgtgtctgtcttcaccagcctgggaagggatgtaattgtgtgtggactttgcagccatgtgtggggctgttgatgtcgatggaaccatgtgggaactattgtatatgatggggtgactcagggtgcagcattgcttggcctgaatgtgacaatatgagcgctcctgggacagatcctcctttccagctgacctgctgctgggtgcctgtgcagagctgggtctgtcagcatcactgtatatacacacctgtccctctgagcgggtccacagccatgcgcgtgactgagagggtgggactgtctcctgtgtttgtatgcgtgtgattgtatgtgtttgtgtgtgtgtgtgtatgggtgtagctggagctgtttgtgtctgtatgactgtgtctgtacctctctgtctgggtaaggacatagcaagtgtggggactatttctaggcctggagaggtctccgtgccttgtccaagcctgtgtgtgtatgtgtgtgtgtgtgcacgcgcgtgcacgcgtgcatccatcatccatccccaagctgtctcctgttgctcccagggctgcgtgtagcagtgtccactgtgtttagctcggggagggtgagccccctctctccattctctttaaatcccagcagtgactctggcatgagggggcccagggtgaggggctgcagggcccagccccaagccccagagcctgccaacccactgcacctggctccgtcctggccccatcctgtggggctgctgatggagagggcccccgggagtcattggggcagcacgggccattaattcattatattaattagctcttcgtctgggctgggggcagggcagccccgcgcaggcccctcccactccagaagtccaaggtcatccagccggccttcctccctctccgcctggtgccagctccaccgcctccgcatgcccagcccccactccctggccctggtccagcccgctggccacggtctacagagagatgactgcgtgggggtgacggagcctgcctgctgtgctgaagtgtgcgagtgggcatgggctcacacctgcaagcatgccctggcaaacttgagcacacagtgtgcctgtgtagatgtgtgtgtctgcaaaggtttgtgtgtgtgtgagggtgtatttgtgcatctgtgatggatgtgtgtctgagaatgtacacatgtggatctctgtgcgcacgtgttcatatctgtgtgtctgcaggtctgttacatatatgtgttatctacatgcatctggttttatgtgtatgccttcggtacatttctgagttaatgtacgtgtgcatctgtgtacttgtgggcctgtgtgtatatatttgtgtgtattcacgtatatatgtgtgtttctgtgtgtatgcatatatactatgcgctcatctttgcataggtacatgtgtgtctgtataccgtacctatgaatatttgtgtgcccatgtacatgtgtatttgtgtgtgtgtatgtgtgtatacatgtatctgtgcataagtgttctgtgtatgcaagtatctgtgtgttgatgtacctgtgtatatgtctgtgcgtgtagaccatgtgtggatgtgtgtacatatctctgcatatgtatatgtatctatggtaattgttggggttctttttgagaccaagtttcgctcttgttgcccaggctggagtgcaatggcgtgatcttggctcactgcaacctccgcctcccgagttcaagtgattctcctgcctcagccacccgagtagctgggattacaggcgtgctccaccacacccggctaatattttgtatttttagtagagatggggttttaccatgttggccaggctggtctcgaactcctggtctcaggtaatcctcccacctcggcctcccaaaatgctgagattacaggtgtgagccaccgcacctggccgtatctatgtaattgttaatctgctcatattggtatgtgtgtcgctgtactctgtatctgtgaatgtatgtgttctgtgtacacaggtatctgtgtctgtgtatatgtgtctgtgtgtatgtcttatgtgtacatgtgtctgcatgtatatgtttgtacatatgtctctgtatatatatgtgtctgtgtacacatgcatctgtgtgtatctgtatgtgtgtgtttgtgtgctacgattgtctctgcatctctggaggtgtgtaggtttgtatgtccatggacacctacccatctgagtctgtgagtctgtgtgggctcatgggaagatacatgttgcatgtgtctgctgtgattgtgtctgctgtgtgtgtatctctgaaaacatcagtgcatgtgtgtggcagcgggtgcaggagacgtctgtgtccgcaaggacgtgtgtgtgcacgtgtggtgcatgtgtgtggcagcgggtgcaggagacgtctgtgtccacaaggacgtgcgtgtgcacatgtgtgcaggtgctaccatgcccgggccttgcctgagctgccaaggctgagccacccccaccttccacagggctgctctcccagagcctggagttcaactctcctgccgacaactacacagtgtgtgaaggtgacaacgccaccctcaggtacctccctcggtgggtggggactcagatctcatggagccatgcggtcctgccccttcaccttcctgggtggggatcctggttacaggaacagcctgggatgggaagacttgggctccacattccccctcagtagcgacacagctatgagctggctccccctcggcttcagtgtccccatctgtcaaaggggtggagagagggggcagagacacacacagagagagggacagagacccagagagagagagggacagagacccagagagaaggggacagagatccagagagaaggggacagagatccagagagaaggggacagagatccagagagaaggggacagagatccagcagagagggacagggttgctgtttccccaggtctccacctctcctcaccctggtctctgttcccccctctctccacgcctctctctctctctctctctcgcttgctctctctctctctctctgtttctgggtctctgtcccccctctttctctgggtctctgtccccctctctctggatctgtctctgggtctctgtccttctctgtgtgtgtgtctctgtccctctctgctggatctctgtccccttctctctgagtctccctctgggtctctttccctctctctctctgggtctctgcccccctctctctctgggtctctgtacccctctctctgtgtgtctctgtccctctctctctgggtctctgttctcctctctctttctctgggtatctgtcccactctgtctctgggtctctgccccctctgcctctgggtctctgtctccctctgtctctgggtctctgtccccctctctctgggtctctgtctctctctctctgggcctctgttcccctctgtctctgggtctctgtccccctctctctgggtctttgtctctttctctctgggtgtctgtatctgtgtgtgtgtgagtctctgtcccctctctctgggtctctgcccccctctctttctgggtctctatccccctctccctaggtctctgtagctctctctctgggtctctctctctctctctttctctctccgggtctctgtccccctctgtctctgggtctctgtgtctctctctctctctgggtctctgtccctctgtgtgtgtgtgtgtctctgtccttctctctctgggtctctgtccctctctctgggtctctgtccctctctctaggtctctttctccttccttctgcatctctattcctctctcccagattctctgttctcccctttttgtgtctctgacacacacgatcactcaataaccacgagctattgttccgttctgcagttgggctcacagctttccctccctgaggctcaacttacccccagctgtatggtgggcacagcagcatccgcctcacagggctgtggtgggacctggagatgcggtggcctccttctcccacccaccccctcggtgggggaagcctcaggctgggtgggtggagaaaaaccttcccactcattctccctgcagctgcttcatcgacgagcacgtgacccgcgtggcctggctgaaccgctccaacatcctgtatgccggcaatgaccgctggaccagcgacccgcgggtgcggctgctcatcaacacccccgaggagttctccatcctcatcaccgaggtggggctcggcgacgagggcctctacacctgctccttccagacccgccaccagccgtacaccactcaggtctacctcattgtccacggtgagcccttggccggggcctggctgggtggaggggttgagagcgtgggggagactaggcatgatgacagataccacgtgttccccaaccccagggatacatagcgagaaagacagacacagccttgcccttggggatttcagcccagcagaagggggccagttacacagacagtgacgcatcaacatgattgcttctagggcaggagagctacagggatgagggggtgcttgggggaagaccacgttcatttgttcagccccattcctggagggcctactctgtgtaagcattgatctacagaacaaggcaggctgtccccacaccttgggagctgattttctgaggacaggctcagagaggacttcccagacgtgacgtctgagctgacgcctttggctgggcacagggctaagaccggaaaagaaacagtgtgtgcagggccaggcaagaagatgagccaagtgtgcaaagggaagtctcatgaggctggaagcgccagatccagagcaggagagatggggctggagagctccacagtgaggcgagaggcagagggcatctgaaatggtggagggtagggagcacctggagagacaggacctggagacagagagaatccagggggatcctggcaagctccaactctggagccagactgcctgggttccaacctcagtgccaccgtccaccagcccagggaccttgagcagggaagaggcccgggactcctttgcaaaatggggatggtgctgtcatatgtcaaatcccagacgtcgtcaattagaagagctacttttattttatgccctactagaaaagaaaaaacaaaaacactgccagcgataccctggcatcctatctcgagggccatcctgcttggagaaatgttcaaatgggagaggggagtggaaagcacagatgacttagaattgatgaaatacagtaacatccaccccagaggctggtagtgagcatctaatcagtggatttgggtaaagcacttagaatagcatctgttacacagaaagtcccatgtgggtatttgttaaataaatttatttaaaataataataaatacaaatagagacggggagaggaattcagaccccaagatggagaaaccaagttaggatgaaggtggagagagaatagagacaagaccagcaattagacaagaagatgccaggcccagacagaggtttcagagaaaaaggcagagactcctgggtctgagggagaaggggctggggtactggactcttgggtctgagggaagaggaactgcgggtctgaactcccgggtctgagggaggaggggctgggggtctgaactcctgggtctgagggaggaggaggggctgggggtctggactcctgggtctgaaggaggaagggctgggggcctggattcctgggcatccatattcagcctctgccgctgcccgcagtccctgcccgcattgtgaacatctcgtcgcctgtgacggtgaatgaggggggcaatgtgaacctgctttgcctggccgtggggcggccagagcccacggtcacctggagacagctccgaggtgaggaccccatcccaggtcaaaagccccgtcccccactgcgcagtctgggcccctccattccccatatccctagctagtttccccagcccccttctccctggccccttggcttcccctcccactctgcttccagttatttcatccacagaccacaaaccccagacctaagaggcgtcaccactggctttccacctgccgtcctaggcctgggccactgcttctgcgtcacttgccaaaccccagcctgcgtcacttccccaaccccagtgtccccgatgtctccccacgcgctcacagcattctcctgggctgagatcccctgccactaggtgccctaagccaggctgcaccagcggtcctgcgtacatctctgcctctctcttctgctggacgctctagcccagcgggcctcatggtgtgggccccagacccgaagcatcagcataccttgggaacttgccaggaatgcactttcccaggctccaaccaagacctgctaaatccaaagctccctctcgctccacaagccccaagaaccagtgctcaaggttacccacaaacggcgccagagtgcccatatatgacagtccaggtcctagacatcacccaccagcccttttatgtggatctccaccaccagatcccagatccctggatcctcattctcagggtctttgaagacccatggtgccagtcactagatcccattccctgaatccctggatcttaccccactgggtcatctgagccccatgagcctggtcttgacatctgggaatctctggatgccctaagtcccagagggtcttctgagactgctgctgtgttatgagacccccatatacttggattgctgatcccaatcaccagatcctgattccctagaccccatgaatcagatcccagaacgagggaccctgccccactggttctgtatttgctagatccttctgagacctaacatcctgggatccccctccccattggggtcctccccacggagctccatgatctgagtcagattcctggagggatctcctgaacccttagattctctaacccaccccactgggttccaggaactgagtcccagacctcactccttcccccacccccagctggagagatcccaggcccccggccctgcagcccctcccccaccccacccccattgacccgggcactccaggccttgccgtgcccgccccgctgatgtgtgtccgtgttgtgcccgtgttgtcccgtgttaagtgtttgtgtccggccccgccccctcctcctccttccccccacagacggcttcacctcggagggagagatcctggagatctctgacatccagcggggccaggccggggagtatgagtgcgtgactcacaacggggttaactcggcgcccgacagccgccgcgtgctggtcacagtcaactgtgagcccccctggcactgggcacgaaagggtggcggacccccgagtccctggggaggagggatctgggggaagaggaagcgggggcgagacttacgggcctgagggaggcgggggctgggggcgggaccccttcgtccccacgcggctaggagaattcgctgacccttgcccctcgccagatcctccgaccatcacggacgtgaccagcgcccgcaccgcgctgggccgggccgccctcctgcgctgcgaagccatggcggttccccccgcggatttccagtggtacaaggatgacagactgtgaggacagcactgagggggccgtgggagcgggaaggggaggtctttagtcccttcgattgtgaggcagggggacggagcggggcgggggaaggcagcagagctctgggtcccgaacctggggcgtccagcttctaggtgatgggatctgtccagccccggagacaagcttgggtccccgcttgatgaatgctggaaccccgtctccccggacttttcagggagctggccaggggtcgggggtcaatgctgaggatctgtcgggcaagatttaggggaccagcagagttcaggagtccctaacgactaggggtgcactacgggagagtccagagtcctgagaggccagggtgcctggaggggggcggcggtgggagtgacccgaggtacatgaggtgctagaacccgaggcgatgggtcactggggtagggggcagaatgctgggtcaccggggaacggaggagcctgagagtcggggggctggcctggctgggcgctgcggcccggcccctgacccggatccctggcaggctgagcagcggcacggccgaaggcctgaaggtgcagacggagcgcacccgctcgatgcttctctttgccaacgtgagcgcccggcattacggcaactatacgtgtcgcgccgccaaccgactgggagcgtccagcgcctccatgcggctcctgcgtgcgtcttcgggcggggcggggccgggaaggtgggcggggccgggggcggggctagggaagtggagacgccgggaccgcccttcaggctggccctgaacttaggagatggacgctgagactgaaaagcaatgcgagtaagaaaccgatccacgcaatcaatattcattgagtgccagctaagggtttgtcgtgggggacgcagctgtgcacaaaagaaacaaggtttggggattcgcagagcttatagtctagtaggagtagaaaagcaataaacaagtggtcatgtaggtaaataagcaaacacatacataaacaaaaaataattttggaggccgggcgtggtggctcacgcctgtaaatcccagcactttgggaggccgaggcgggctgatcacctgaagtcaggaatttgacaccagcctgtccaacatggtgaaactatgtctctaccaaaaaaaaaaaaaaatacaaaaattagccaggcgtagtgatgggcacctgtggtcctagctattcaggatgctgaggcaagaggattgcttgaacctgggaggcagaggttacagtgagccgagattgcgcctgggtgacagagcgagactccgtctcaaaaaaagaaaaaaaaaaaaaaaaagaaacagagtcagaaaagcaggcacacccaatgagagatccagaaaggacgctaaagagtgggctcagaagagatggggcccctggagagacacacatggggttccccactctcaggcctccctccatgaccccttctcttcccccaggcccaggatccctggagaactcagccccgaggcccccagggctcctggccctcctctccgccctgggctggctgtggtggagaatgtaggcgcaacccagtggagctcacctccccctgcagggggcctcaggccaagagtgagagaaacgggggagcaagagccgtgggtctcgtgggggcagaagagctctcggccaccaaggaagaagagagaggagaagaggaggaggcagaggaagaaagatcttcagagaacccatcactgtgagggataacgcaaaattatgcatctttctacagccattctcgccacccgttcacgtttccgattgtgacccactcccgccaccccatacccctctctcttagctcaggctgtcaactggcttgtgtgggtgtgggtgtgtgagtgtgagcctgcatgcatgtgtaggtgtctgtgtctctgtttgtgtgtgtgtgggggggtgggctgggggaagggactcagccgtcctcccgcccccaaaacccccatgtccactgtccccaaccctattgcctctcacctctggctggaggtaggtatgaggctctgcagtggaagctgtgaagagaggcttaccaggctccctgcttccccaatatatgcacgcacactacccctccccctgtcgaaagggcaactcctggcaggttgggagtggggaggggcatcgcactcacctgtcaagctgtcattcagcctttgtgagtaagtgggggacctccatctaggctctgggcttccctgctgtcaaccaccagcttcctgtagccagaggccccatcgctggctcagtggcctgagaccttcccacttttcctgtccctccacaccctggattttctggccccctcctgggccaatcggtgcttccatccaactgtcagactggtggcaggagtcacctgtctgtttcagtgctttgccctacccttgccaccactccccttggccttgatttccccacctgcggcaccagccagctgcccttggggcctttgcagctggcccacaggtgtgagcttgctggtctatcacttcctggcctctccaccaactgtacctcccaaaggctacctgaccgccctcacagacactcagacgcaccacacacacatacacacacacagacacacacacacacacacacacacacaccagcgactgtgaccagcaatagccccctggctccagctgtccggtagctggtgactagctgtatttccccctgggtaggcatctggtgtcaggaagggacgctgagaggccgcagcctcagctctgactgtaggaacactccaccctggtacaccacaccacacaaagtgggggacagagaggcatcacacagacatcctgagcccagacaaagatgccatgtcaccaactccgactcccaggagaccctctatataaacacccaccccaaaccacaccacccagagtctggtggagaaaaggagagggcaaggcgcagtgactgtacctcagacgggggcatgggccccatcccacattgtcttccattcccagggtccaggggatggggtgggacaggggagggatgctagggagggggtggggggccctgggggccatgtgttccaattcatggggagtgttgagaccaccacaccaataaacgcctttttccaaagtctgcctgcaggtgtcaatgtcattaaggattagagttaatgaagggcaaagggtagcagtcaattggtggtgcctctccagcatcattcctaccgcctactttctcactggtagacttggaatggactcattacagagatgccctgtgattggccgaagacacccagcatagcccatttcccaccgtgattggctcagagatgggcacatgacccagtaaggctaatgagaaagtgaatggattcccaagaagagatgcttttctgctggatattgtggctccgtgatgtgaagtcaacatctgtagggttgcttttctccatcacatggagagatcttggctctgtggggatagcaatggtggggaggacagcatatggagcctgagaaggataggaacactgtgaagggcagagtggaaaccttagagaaactgagtccatgattatatatcatttgagcagctggatcaaaacttaactgatgcccattttcacttatataagcaataaagtcccctgtatatttaaaccaatttgcattggattttctatctctagtaataaaaaagagaatgaaaaccataatagatacagaagagacatagaaggcccagaaccccaaccctcacctttccaaaaggatccaggggttctattttccaatggccttttctacccccaatcattaaccagaaattctctcacatgctttccttccctgagacagatgctggttgcccacatttgagttgtttggttcccctttcttcttcgctggcagatccacgtgttatgatacaggctagatatctggtttcctagcctcctttgcagctatgtggccagtttgggccaaagagacataaatggaaatttgcttgtaggtttccaggaaagcttccctcccaccccatgagagggaagaaggcagtgatagagggaggtagagggtggggaagatgtatagggaggaagttctgcccccttccttttatctttggatacagttgtgtgaagatgtgatgactggagctgcagcaaccatcttgctacgtgaagcaacatgcttagagtcaatgtgccaacccactgagggtggcagagcagatggatgcaaagggcccatgtctttaatggcgttactgagctgctgagccagcctgaaaccagccgcctccatagttcttgccaccattttattttgttacttgcagtcaaaagaatcctcaccaatgcactctctaaattctcaattagaaacccagctgaaaaagcaagacttacgctgaagacagcagcagcaagcccaactcttcactggcaccaaaacatttgatcagtcaacaaatatttattgattgcctgctgtgtgtgaggctctgggttaagtgctgagttaatgatgtggtctctgcttttgtaaagcccttagtttagagagagagtctcaggccacacaagaaattacatatttatgtatcaggaacggcaaattcaaggattctgggacttaacccaagactaagggaggggtaagggaacggtcgtctaagatggtaactgctactcttagacttgagaaatgaatgacatatgggaaaaagaagtgttataagcacagcaaactctaggggcaaaataaattgtggctgagagacagactgtgatactggagtccgggggcagagaaagaattgggaggggaggtcagggaggccaacagaggccagaccacaaggttttgaaggtcacgacgatgagtttggataatatctgaagggaaatgcacaggccgtagaagcgtttaaagagaagagtgacatgatctgatctgttttaagatgaagatgctgggagctggatggggtgtggcctacaggtggcaaagtgaatgtaaggggaccttttcagagaacatggccaagctccctctctagctcagagcaacacagcaagccctgcctgtctgctgcagaggcttggaggttgtgcaaaccacacagttagatcagcaagagtttcccagccaagaagtcacatctccttacttgcacaaatacaggaagactcttcttctgcagcaagagagggagacagaaagtcccactttcagggtccaaccctcagtcatagcaggccctggctgctgctggagtgaaataggaagttctggcccaaaacgccctgtgcagggcagaccactggctctgatcacacctgtgtggctgcgcgaacagtctttgagcctccgcctacagagacaactgaactggggtctgtgcctggaagagagaggtggggtgaggggagaactcagtaggtactctggatgtgacataactcacccgcctaactttttctagctcttgcttgaactttttagagattatctgggaaccctccatttggagaggggaaaaaaaatgcctggctatccttggtggagcgaagccagccaacaacccaacccagttgttattttttatttatttatttatttatttattttgagacagggtctcactctgtcatccaggctagagtacagtggcaccgttagagctcactgcagccttgacctcccaggcccaagcaatcctcccacctcagcctccctagtagctgggactacaggtacgtgccaccatgcccgactaattttaaaattttttgtagagatggggtatccctatgttgcccaagctggtatcgaactcctgagctcaagtgattctctctcctcaaccacccgaagtgctgggattacaggcatgaactatcacacccagtcacaacaatccttcttttatggggaatgaggtaactgtaccccacttcatagagaaaaatgggccttgcccaatttttatgggaaagaaaaatggaggggctgggcgtagtggctcatgcctgtaatcccagcactttgggaggccaaggtgggcggatcacttgaggttaggagttcgggaccagcctgcctaacatggtgaaatcccgtctgtactaaaaatacaaaaatcagtcaggcgttgtggtgcttgcctgtaatcccagctactcaagtggctgaggcaggaaaatcgcttgaacccaggaggcggaggctgcagtgagtcgagattgcaccactgcagtccaacctgggcaacaaagtgagactctgtctccaaaaaaaaaaaaaagagagagagagatcctatttccctcctttggagaagaaactggaattcactcttattttaatatacatcaaagttgggcgggaagctctgtccaactttgatgcatttttaaaaaggataaagttatacagactgtaaactaacaagtaaaactggagttagataattgagaccctctcatctccctgactgtaatacaagaagttccgccccgattccaggaggaaatgagggcacccacactcacttggtaggccctagttgagctgtggtcctccagagggactttgaggtccagaggccatgaaatctccactggggtcacactatgcatcttcttttctgagggggtgaccacggggaccaaggtagaaggatgcttctttttctcaggagtctttcctgattgagaggcagaagagaagcaggaacacgtgattggctgccccaacatgccaacccagccaatagcaagggaagctggttggagaggcggagccttatgctgattggctgatttggaggtaggagggcaggatggatgacctatgacggcactgattgcctcagccaggtcttccataggcctctttctagggtccctccccgttggtcatggttgccccttccccagtccccttgctcaccacgaaagcggcacaggcagcagatgcaaaggaggagaagtacggctagcagcgccaggcccagcagggagcccaggacgatgccagcgatggccccatggctcaacgtggggcctggaagagacaaagagaagaaagagaaggggaacaggaaccaaggttggacccaagtttcctaagccccctaactttgtgctgggacccaggagtccggcccccactgtccctcccctcccagaacccaggaatgtgggaccccagcactctcaactcatttaacagttactgagtgaccgtggtgtgcctggctctcagacaggtagtgaggattcattcgtgggccaaacaggaaagatatctacccttatggggcttaattctaggagagaagacataaataaatgagcaatacataagataatcacagattgtcccgagaaagaaaaagtgatgtgatagagataatgggggacaggtgtggtggctcacacctgtgattcccaacactttgggaggtcaaggtgggcaaccacttgagcccaggagttggagaccagcctgggcaacatagcgagatcctgtctctacaaaaaatagaaaaactagccaggtgcggtggctgcgcctgtagccccagctactcaggagactgaggcaagatcacctgagtctggggacgttgaggctgcagtgagcccagatcgtgccactgcactccagcctgggcatcaaagtgagaccttctctcaaaaaaagaaaacaaacaaacaaaaaacaaaaaaggaacaatgggaagggatgtgacatttagaaacagtggtgagctcaggtccctgaggaagtaacgtttgaacagagacttgaagaataaagaccagagacagtcatactaaacccggggaaagggcgttccaagaggagggaacagtaaatgcaaaggcccagaactagaaaagctttctctgttcaacgaaggccagcgtgggtggaggataaggaaggagcgggctggaggtggagagtgaagtagaaaaggtttccaggaaccagatcctaaaggggtcctgcagaaattaatggacggcttttatgtagagcagcctcatgatctgatttgcataactttggcttctgtgtggagaatgcattatctgacagcaagagggagtataaagagaccaaataaactgctgttgcagtccaggcaagagaggatgctgtgtttgaccagagccttggggtgaagatggaaaatattttagaaggaaaatggaccgaacttgctggcaattaggatgtcaggggtgatgtggcctgtaagtggtgacatttatgaggatggggaagactgcagggttggaggatgcagttttgagggaaaacatcgaaagatctgttttgggcatatgacatttgggatgctaattggacatccaaagtgaagatcttgactcacgcctgtaatcccagcactttgggaggccgaggcaggcagatcacttgaggtcaggagctcaagaccagcctggccaacatggcaaaatcctgtctctgctaaaaattcaaaaaaaattagctgggcgtggtggctcacacctgtaatcccagctactctggaggctgaggcaggagaatcacttgaacccaggaggtggaggttccagttagctgagatcatgccactgcactccagcctgggtgacagagcaacactctgtccacaccccccacctccccaaaaagtgaagatcttaagttgggcgcatccttttcaagagagaagtcagggcccaggataagacatttgggagtcatctgattattaatgttattgaaggccatgagcatgaacatgatcactttggggagtgaggactaaatcctgagatgctccaatggaggcatgttatcaactgaattgtgcctaccccaaaagaaaaacatatgttgaagtcctaacccctgttcctgtgaatgtgactttattttggaataaggtctttgaagatgtaaccaagtcaatttgaggtattagggtggaccctaatccaatataactggtgtccttaaaagaagaggacagaagccaggtgcggtggctcacacctgtaatcccagcactttgggaggccaaggtgtgtgggtcacctgaggtcaggagttcaagaccagcctggccaacatggtgaaatcccatctctactaatacaaaaattagctgggtgtggtggcgcatgactgtaatcctagctactcgggaggctgaggcaggagaatcacttgaatctgggaggtagaagttgcggtgagccgagatcatgccattgcactccagcctgggcgacaagagcaaaactccttctcaaaaaagaagaaggagaaggagaagaagaagaagaagagacacacacacagggaagaagcctgtgggaagctggaggcagaggttggagtgatgcagctgcaagtccaggaacgccaaggatgaaacagccgccaccaggagctaggaagacacaaaggaggattctacacagggtctcagagggagtaggaccctgtcgacaccttgattttttttttttttttttttttgagacggagtctggctctttcacccaggctgcagtgcagtggctgatctcggctcactgcaagctccgcctcccgggttcgcgccattctcctgcctcagcctccccagtagctgggactacaggcgcccgccaccgcgccaggctaattttttgtatttttagtagagacggggtttcaccgtgtgagccaggatggtctcgatctcctgacctcgtgatccacccgccttggcctcccaaagtgctgggattacaggcgtgagccaccgcgcccagccgacaccttgattttagacttctgacctccagacctgtgagagaagaaattcctgtagtctcaagccatgcagttcatggtactttgttagggcaggccccaggacactaaaacagggagacacggaggatctggcacaacagagaaggtctactctgacagccccaactcaccggcccggtagacccggctttgtgatggagtccctggctggccccccaggatgggcaggatccgaaaggtccaggtccctgggttccgaggtggaaggggcaccacggctgaccgctcctgaggccccaggatgagcagggagacccagtccctgtaggtggaagtcctgcccagagcaggcccatctggccatgcctggatctcaaaactgctgatcagggccccgcgctccacatcccaagtcagcacggctgcatctctggctctctgaagcctccacgaggatatggagggtcctagagggatgtgggggtggctggattcttgggtgccagaggggagagggaagggggctggggggctgggctcctgggtctgagggggagggggctgggggcctggactcttgggtctgagggaggagggggtgggggcctggactcctggatctgagggtggaaggggctggtgacctggactcctgggtctgagggaagaggggctggggctagacccttgggtctgagggaggaggggctgaggcctggactccagggtctgagggaggagaggctgggggcctggatccgaggtctgagggaggagaggtctggggcctgaacttctgggtctgagggctggagcggctggggacgtggacttcagggttttttgaaataacgtggctcaccaatgagggtgatctggtcaccgccagcacccagcgccccactgcacagcacggagtaatttcccaggtcccaatccaggctgaagttgccgatgtggagtttccgcccatcttgactgagccgcaggcgactcccgcctcctggagccaggggcctcccttcccgggcccaggatgcccgtgagggtgggggacaaccagaggcctccagtgccacctctgcctcccccaaccgtgtctctgccaccagcggatgcagcagcacctctcggggggcctctgccggtgggagaagtccagttaagaaagtcaagaccttaccttggattcaaagaacagatcctatgccctactttaaatcagatggtggtaagcccccacgctttggccacctgagaaagaactgccaatttactcactcattagctcattcattcattcattcatttattatctgatttcctcatcaaacacttattgaacacataccataggcgcaggccctgtactgggaaactcatattattttcagctattctttcttctttattattattattattttgtagcaataataattacaagactgggtcttgccacactgcccaggctggtcttgaactcctagactcaagcaatcctcccgcccccagctaccaaagtgctgcgattattgcgcccggccttgttactttttaaaatatcactgctttatctctctgaacacgtgtgaaagtgatggccttcttcctgtgtccagaaaaatacccccatccctgcaccccgccaccatgaggtataggaaaatctttgtcccttttctagtttgaagacagtgaagtcctgcctctttcttggactaaggacgtaccccataccccttcagaattttcgaaggaccaaagaaaaagtctccctcctcctcgagaaacagcaaaaaagccccgcgccctctcacccggcgtgactgtgcaggtacgcgtggccaccaggtggcgagcaaggcaggtgatggggacgccgctgagccgggggtgggcggggacggccgccagcagcacagaggacactggcccggcgcggatgccttcggggagaccctggaactgcagggaggcagcaggggccccgccgggccacgagcagcggaagcggaggctgcggtccccgggacccccttcaactgagcactgtggggccccggggggcaggtctgcggagagaagggagagaatgaagatggagtccctttctcatttcttctccagccccgcctccccgcgcggtgactccacccttcttcactagccccaccccataggcgctcacactccccacttttcctgcgatcccgttcccttttcccattaacttcctcgctaagtgggtagcccgcagccctgctgactgcccaactttcttaagaaaactgcatcttcacacaatgatatttctcttcccaaacgtaactcagccccttcctttccagctccacccacttctgccaggttacttcgccccctcctggattgcactccgagaagcctccccttttcccagatatctccgcccttccttgtggaccccttcccctttctaagacaattctgcccgctttctaaatgacctcgcccctttccctggtgactccgccccccttgccaggtaacttctccctttgctgatcccacttaagcaaattagttctttccttttctaactcccactctttgccatttaactccgcttgtcgactttgtcgagtgttccatgcccaggaatgtccgccctctcagtgctgggccggcccgtcagtcctggtcatccctgccactctatttggctccttcccttatcctctttctggccccgcctcttatcctaggtgtctccgcccctccgcgctggcccgccccaccacgggtatcccagctccttcttggtgacccgccctcccgctggccctgccccacccaccggtatgctgctcctccttgctggccccgcccctttcctctagccccgccctcgttctggccccgcccctctcccaggcattcccctactcccgctccagcctctcacccgccactgtaaggttgagcagcgagcggcggcggcggccggtacgcgggttcgccgccaggcaggcgtaggtgcctgcgtggcccggtccgaccgcgggcagcaggaggcgcgaccccgcgggcaccgcggcctcggccgggtccgccaggctccacgtgatgtcggcgggcggccgcgaggcggcggcgcagcgcaaggtcacgttactgcccgcggtgacaaagcgggcaggcgcggcgtcgcggtccgaggagaccgtgatggtcggcgggtccgggccgtctggagggaggaggggtcgggaccgcgagtgtcagggtcacctgggacgccgctaggactcccggagactgggtccccagcccgcttctccccaaggaccccctgtccccgacccgaggcatcccccactcacagaagacgctgacgtcggcggcagcctccctgtggccgaaggggctgcggacgcggcaagtgtaccgggcgtggtcgctgcgcacagggcgcacgatgagcagctggtcgccctctgagcgcatccggggcgtctcggctccctccgattccgccgcctccagggcgcgtccgtcccggctccagctcagctccccgcgacctggcccccaccccaggcagcgcagccggagctcggccgccccctcctctgtctctggagccttgggctgaaccgacagctggggtaggggctctgggagagggagaatgggctcaggacccacccagtcctggagcccatctttggtccccttagagggaaccccagccgctgctccctctaagcccctggagtctcagcccccatccctctcctctcataaacctatgagtttgagcccccagacacctcctctccgggacccaggagttcgccagaagaggctcctagcctcctcctcctccctcagacctgggagttcaggctcccaggagtctccatcccaggtccacctttgctcagacacccctgccttgacctctagctctttttctcccttcctcaacccagaagtcctcttctcctatccagggaccccacagcaccgtgacttgcccaaagcctggcagagcagagcagcccctgccgcctgcacgccggacgccagggcccacttaccatacacacccaccgtgaactcgtgagtctgctgggagacccctgcccggatgacctcagccgtgtagacccctgcatcgtccagctgggcagaggcgagctccagaaccccccgggcctggtcaaatcgcaggtggtctcggtgagcagggtccaggctgatcagaggtgcccctggccccaggcccccagctgccagcacctttgagccccggcgccagaccaccagagaggtggggggcccagggttggggattgggactagggggagccggatggtggtccccaccagcacagcgagtgggccccccacctgctggggaaagcttgcagctgagtgggtctctgcagaaaatttggattcagggctctgggcagagagtttaagatccatatcatccggggagaattttgaatctggggcctcaacagacagtttggtatgggagacttgagtagaaatgtttgaagctggggtcttaacagtgaaggaaggcttggggtctttggcaggaacttgaggatccgaaatatcaggaaatacttcagaaccaggggtttcagagaagggggaaaccgggctcaaatcttggccctcagcagaaacatttgaccagaaggacccagacatgttggaactcagggcctcaggaaaccagctggaatcagagattccagcagaggcttttgaatccaggaactgatctggaactttccagctgggaggtttgatggagggaacttccacacccagcccctgggaagagctctttgagtctgaagagaaggcagaggagaagttggtttgctgaagtccagaagaggctctgagggtgaggatccctaccaaggaggctgcagagaagagaggaaggcattgggggaggctgctgagggagactgacagggaagggactgagcagggaacttacccaggagtaggaagagtggcagagcctgtgggttgtccatggtgctggcctcactgaaaggacactggagagagacccaggactgcacccatccctcccgggtcagacgagtccaacaggactggtagcttagcttcctgggaggggaagggagccagacccagagggaggtgccaagatcctcaaccccagtgtggtggctgagctgcccacctcatcccactctcttcattagctggtcccatctgcagagaggcccagcctgatccctgccctccccacccccagggggaagctggagaaaacattcccagctaaaaatgtgggagcaaatttgtgagacaaagccaggaagacttcctggaggagggtgaggtgacctttccgagagccccacctctgatggccacagcttcagagcaggcttcctcctccccagcctcctggctccttccactctgtcttgcctgcagcctcagatacatctgaccctgctcctcctctgctccaaaccctcccacggctctctgttgccctcagaaccaagtctccaggtgctatctcctgccagggcctctatcctgagaccagagctgcatttccgcatccccgaggccctcacatggcctgtgtcccgctaaactcagactctttcctctaacccaaacttcctcacacctccaggatggcttcactgtcttcgcaaatgctggagaacattcccacctcctccctccctgtcaccactgtcgatctgagtccaaccctcctccccctagttctcactggccaggctctgtcttctcttcctgccccgtctccctcctctgcccagtctcctccattccctgccagggtccttctatacccagagctgaacctgcctccccctgctcacagccctcccctggctccccagtgccctctggagacatccaaggttcaaagcaaactcatgcacagcccccactcaagcacttgaacatcctgccattcttatcctgcccgcccatctcacctcccagtcctctacctggaatgctctctcccactctccacctccctccaacctggctaaaccacaacttgtccttcaggtctcaccttattaagaaccataattaccacttaatttgagccaggaactacgctaaatgtttcctatgcactatcaggctgaacacttctaaacaccctataagctgagtgtcattatactcactttgcaggccaggggacttaggctcagagaggtcaagggacctgcaggaggttgcacagccagagggagaagctggacttgggaccaggatggtcagaccattgactccttctgatagcttttcccaccatcccatgtggagcttagggcctctgctcagctcccagtcctctaagcttaccctggcccagttctcaccagtaataatactggtaatatatatatattttgagatggagtctcgttctgtcacccagtgagtgcctcagctcactgcaggctccatctcccgggttcaagtgattctcccgtctcagcctctgcagcagctgggagtataggtgtgcatcaccacaccaggctaatttttgttatttttaggagagatggggttttgccatgttggccaggcttatcatgaactcctgacctcaagtgatctgcccgcctcagcctcccagtgttgggattacaggcgtgagccaccgtgcccggactaatattggtaataatatatatttagcattttttgcatagcaggtgtggttatgggggtgctacataaattaacctttcaaaactccatggagtagatgatgtagcttaaagagggctgcaaatttgagcgtcctcctgttaagatgcggggtctatgtcccctctgcttggatctgagtagctgtgtgactgctggaccaagacgtggaagtggccctgtgccaggatctgcatctaggccggcatatgccactttctgtatcataggacactccctcatggaatccagccgccacactgcgaggatcagcagccccatggaggggaatcatggcccctggtcagcagccccagccagcttgctggctatgtgggtgagccctcttggaagtcaatcccctggccccatttgaggcacatgaactgatcctgaactggatccaggaatggatccagtgggatttgacccagggccctgggacccagaacccatacccttaacctctacatgatgctgttactattttcatctgcagatgaggcaactgaaactcaaaataggaaggaactcacccaagatctagctggcaaaggtaagagtgagcatatgaaatcaatatatctgactctatcagaaggccagaggaatggaacacaattttttaaataaaaaattagtccaggcgctgtggctcacgcttgtaatcccagcactttgagaggctgaggcgggcggatcacttgaggtcaggagttcaagacagcctgggcaacatggtgaaaccccgtctctactaaaagtacaaaaattagccgggtgtggtggtgcaagcctgggcaacagagcgagactctgtctcaaaaaacataattaaaaaaaaattaacctgactgtagacccaggctgttcattgcaacgctaagttttgattctctgtggcttgtctgtctcacaccagaaccacagcttctggcctcattctctcctgtgtccctgctgagactggggacacaagagagaatgagtgtcctgcaaacatcgtggataaaagcccttcttctcacccacctcactgatatttgtgttccaacactcaacttggaagtcatctccctgggaaatctctgaccccaccggctgggccaggccaggtcccccagttgggttcccaagggcccagtgtgcctccacgtctagcatacttcaccccgaattacagctgcctttgtcctcattgtcccccgcatcaatacagaggctcctcatgggcagggactggatccacagggcctggcacacaaaagactcaagtaaatgttgaatgaaccaaataatgggtctctaggaaataagttaacagagatagatgttgagagtcagttttattgccatctctgggaggggctcaaatccgcccaatctccttcagcttggccaccaggtcctcagtggtctccaccttgacgccggccgtgcgctggggcgggtcctccacactgatcacagagagcttggaggtcaggtccacacccaggtccccaggcttgatcacctcgatcttcttcttcttggctttctgcacatgggaagccattgttcacagggctgtggaactcctgccacccttcctgccacctccttcccatgggtgccaggcctgcagaccagtcccatgggctgaaccctctggacccacccactggccaggacacgcgaaacttctcacagggccacacctggtgtggacaactcctgctggctaggaggccctgggaggcccaactactgcagcagtcctcctttaggtaaccaaatcaggaagcccttcactggctgcaacagagtggcaaacccatccttttggtagtaatgactcagtggacttttggttgagatggcatgctgaaggctcccaataggctgagatgatgcactgaaccctccctatagactgagatgatgcgctgaaccctccctataggctgagatgatgcgctgaaccctccctataggctgagatgatgcgctgaaccctccctataggctgagatgatgcgctgaaccctccctataggctgagatgatgcgctgaaccctccctataggctgagatgatgcgctgaaccctccctatagactgagatgatgcgcagaaccctccctataggctgagatgatgcgctgaaccctccctataggctgagatgatgcgctgaaccctccctataggctgagatgatgcgctgaaccctgcctatagactgagatgatgcgctgaaccctccctataggctgagatgatgcgcagaaccctccctataggttgagatgatgcgctgaaccctccctatagactgagatgatgtgctgaaccctccctatagactgagatgatgcgcagaaccctccctataggttgagatgatgcgctgaaccctccctataggctgagatgatgcgctgaaccctccctataggctgagatgatgtagtgaacactctgtaatggctgaaatgactcattgaaccctccccattagttgagatgatccagtgaaccctccctgttggctgagatgaatattctctattggcggagatgacccactaaactgttaatattggccaagatgacccagcgaacccatctactggccatgatgattagtgaactctacctgttagccaagagaccccatgcacccttcctagttaactaagatgatctacatggtaacttcacattggcaaaaattaccaaggggaccctccctaatgaacctagatgacccagtgaacttgttccactggctggaatgacaaagggaacaccttctgctgcccagcgaaggctttctactggcctagataccagcaagccctccctgctagccaaagcagcccccatgaactctcagtattggcagagatgacccagcaaactctctctatcagccaaactccaggtgacggcttcctgtgcacgagacctcctttggatccttccctccccacgtgcgaccaccggggggcactgggctggcaatgtgcttgccacccccaggccctcagtgcccgctggccaggggctcaccatgatgttgggcagcgtggcgtagcggggctcgttgagcctcaggtcagctgtcaccacagctggcagcttcaggcgcagggtctccaggcccccatcgatctcccgctccactttcaacttgtccccctccagcgtcacctgggaggcgaatgtgccctggggagggacagtgtaggaggagagtgggtgaggctaattcaggtccgacccgagcagtctgcttatgccactactgagtacacgcatggactagtgaatgaatgagggagcgaacaatgcagggtcccatgaggtttagaatcgagcttgtacacctgggagagggtctttttcctttccctgagagccacggtgtatgtcctgatgtcccatgtcctgatgctgccagtgaggcctccctgccttcctgacagggaacatgtactgagtgctgagccctgtgctaagcaactgatgtatcaagtcatcgaatcctcgcaggaactttatgaggtaaatgttattatccccactttacagatgagagaaactgaggcagcaagatgctgagttacacgcccactgccacccacagctggtaaatccaaaagctgacaatctggctcccaacggccccccgtgaggcccctccgctgggcagacaacagaactgtgtgtgtccacaccagtccttaaaccaccttctgggaccccgtcctctagccaggtccctttgcctctcagtcctgaatcaacatttcctcccctggtaactgatgccacctacactcctctttgtctaacgacctttgtccctgtccacttattaactggacacatttttcaggtcttagtgtgaacatcacctcccttcattcacaacctcctcctagtgcccttatgaacctgcccctggagacacactgtgaacacgaccagtgaagcaccagcttgggtgggctcatattctgccagggaagacaaccagtcaccagggaaaaacacacacacacaaatgagatcatttccaatcagaaggaataagaagaaaataagacacatgatatgagagcaagaagggcgcacgttggagaagctagtcagacagtggtaaatgctttgaagataaaacaggataatggttttgaatgtgttgtcccatccagtagccactggctgcgtgtggctgtccagccagtgcagctgaggaatgaatttttacattttatttaaatttaaatactgataatttggccaggcgcagtggttcatgcctgtaatcccagcactttgaggggccaaggcgggtggatcacttgaggtcaggagttcaagaccagcctggccaacatggcgaaaccctgtctctactaaaaatacaaaaattatccaggtatggtgatgcacgcttgtaatccgatctactcgggaggctgaggcaggagaatcgcttaaattcgggaggcggaggctgcagtgagccaagatcgcgccactgcactccagtctggggacagaacaagactccacctcaaaaaaataaaaataaataaatactgagaattcaagacacattatcatgattgtggtgatgatttcatggatgtaacacatatcaaaacttaaattttggagggctgaggtgagcagcttgcttgagcccaggagttaaagaccagcttgggcaacatagtgagacccccatctctatctaaataaaagagtttaagaaaagcaaacttaacaaattgtgcaacttagatatgtgcggtttattgtaggtaaataactcaacgaagctgtttaaaaaaaaaacaaaaacaaacaaacaaacaaacaaaaaaacacagatacccaatgcagttactggaaatgcagttactagaaaacttttaagtttgttttgaacaacttgggtgtgtaaatctatttcaactgtcatctttaggaatgtgtttctcatagaaatttagcacctgaattgagatgtgctgtaaatataaaatacatgctgaattttgaagatttagtacaaagaaaatccaaaaaacgtaaaatacagatggtccctgacttatgatggtttgaattaagatttttcagttttccgatgatgtgacagtgataaacattcagtagaaaccatactgccagtgtccgtacaaccattccgtttttttagttccagtacagtatttgataaattacatgggatatttagcactttattataaaatgtgctttatgttagattattttaccccactgtaggctaacgttaagtgttgtgacatgtttaaggtaggctgggctcagctatgatatttggtagattaagaatattaaatgcattctctcagttataatattttcaatttatgatggatttatcaggacgtaaccccattgcttgtagagcatatgtatcttaatatttttatgttgattacatgttaaaataatattttagatataatggggtgaaataaaatataattttgtctgtttctttttacttttttatgtagctgtgaaaaattttaaatttgtctatgtgccttgcttctttttttttttttcttttgagacagggtttccctctttcacctaggctggagtacagtggtatgatcacagctcactgcagtcttgacctcctgaactcaagggatcctcccacctcagcctcctgaggctggtactacaggcatgtgccatcacacccagctaacttttcttttttggtagagatggggtctaactatgttgccaaggctggtctcgaactcctgggctcaagtaatcctcccaccgtggcctcccaaagtgctaggactacaggtgtgagccactgtgccaagcctgcatttcttttttctttttttgagacggagcctccctctgttgccaggctggagtgcagtggcgtgcgatcttgcctcactgtaacctccgcctcccaagttcaagcaattctccctcagccccctgagtagctgagactacaggcgcacgccaccacacccagctaatttttaaatttttagtggagacgaggtttcaacatgttgaccaggctggtctcaaactcctcctgacctcaagtaatccacctgcctcggcctcccaaagtgctgggattacaggcatgactcaccatgcctggccccagcctgcatttctattggactggcagagatggggactggggaacctagagttgagcgggtgggcatgagtatttcacgtaggatggcaaggaaggcccctttgaagaggtgatacctcagcagagacctcaaggaggggaacaagaaagccatgaggcaatccgagggaacagtgttccaggaggagagaacagcaaatgcaaaggccttgaggcagaaatgaagtttgagggatgagggcctggccctcagcaggtgctccccactccagtctcacctgtggccagtcaagaaatccagctgtcatctgccctgtctggttacagtcatcatcgatggcctgaatggggagagacagaagactgtatgacaatcagtggagctcatggaccattcaggcctctgtctagaacaggggttggcaaactttttctttcttttttttctttttgagacggagtcttgctctgtcacccaggctggagtgcaatggtacaatcttggctcactgcaacctccgcctcttgggttcaagcaattctcctgcctcagcctcctgagtagctgggattacaggcacccaacaccacgcccagctaatttttgtattttcagtagagacagggtttcaacatgttggccaggctggtcttgaactgctgacctcagatgatcccccaaagctctgggattacaggcatgagtcaccgcagccagtcgggttggcaaaccttttctatggtggaacagatgtagtaaatatctcaggctctgcaggtcatacggtctctgtcacggtgactcagcgctgctgttgtagcacacaggcagccataaataatatgtaaatgaatgtatgtggtgatgttccaataaagctttatttacaaatcagaggtcgctctgggccatagttcactgacttttggtctagaacgatcccctcacttgggcccagagataagcagccacttgtccagggacatgtggggccacctggcatccctgtcgtcaagtctctgccctctgtataaagcctctcaggagtcccaccctatgtggcccctgggcagctgcatgaacagggtctgggccagcaaggacattctagccccagcccagtgattggttcagggaggggcacatgactcaagctgcaccaaagaagagtcagccctgggagtttgctggggcccttgggaaagatgctcctttctttctgctggggtcactgggctggtgggatctgagcctggagatgcagacagtgaagacaaggtagaggggagcctacagctcatatgtgaccctggatcaagctgtgcctgaagcccctgatttacgtgagataataaattcgctttctggcttaagccagtttgagttgtgaatctgcttcctagaacaaacagcatcctgaccagttcatccggcatttccccagctggaggccctggccccaggaactgtccctggcccaggacaggtaggacatcggagtctgagaacgaccagcaaatgcagggggctgcaaaggccatgcttccagcacctcggcctctgcagccccacccaggccctgcctttttggcctgttctccgggtaggcccttcggccacagttgactgatctgtactctgatgcccctgctgttgataatctctctctgttttcttctgactttctcagggctgggcaggacacccagtgacctacctggacccatcagcctcctctttgtcccagaactgacctggccctgggatccccatctctctccgggggccccagctctacctgagcctgctgtgctctgctgtctccgtgctctgcttgacataccttgcagtctttggccttccttctcagcctcatccctaattccctgcctcttctcactcccatctgcctgtggctcttctgacgtccctcttctgccccttccctggttgaggccatgaggtttgccctcaaatgagatgagctacccctgagcagaggtggtgcccgagggtctcctgggggaacagatgagctccatgtacccctatctcagtggggagcaccagtgtggcagggaaggttctggtcgggtcctcacccagccctaacctccttccctaactcctggcctccaatttcccattccagtccattctcaaagcccaggggggctctttctgcacctagtgctgatcccacccctcttctgctcatagaactcccatagctccccagtgccctccaaaattctcaagtctttgtttcaagcccaggcctgtctcctgaacctgcatcgatgtctcctgggctcttcacactccccttgtaggatcctcctctaacctcctgttcttcctgggtttcctacctgtgttaccaaggcagacccaggcactgtccttgcctcctccctgccctccctccccatgctaagcccagtctctcctgccacatcatgtctctgctctgtcctgtcacctttggctgaggcctcattctcccccatgtgaccatcacctcggcctcccagcctctaaactcacccaaaaggatctttcttctttttttctttttgagacagagtctcgctctgctcccaggcaggagtgcagtggtgcctggagtgcagtggtgcgatcttgtatcactgcaacctccgcctcccaggttccagtgattctcatgcctcagcctcccaagtagctgggattacaggcaggtgataccacacccggctaatttttatatttttagaagagatggggtttcaccatgttggccacgctaatctcaaactctcgacctcaagtgatccactggcctcggcctcccaaagtgctgagattacaggcgtaaaccaccgtgcctggcccaagaggatctttctaacacccagagggactctgtcctccctgctcaaactctctgtcagaagggtcagcaaagtcccaagctgctcagcctggagtggtgaatgccctgggcctggccagctgctgtctcaccccgtatctccaccaccctcctcccgagcagggatgagcaagggggcacagggagggctgaccacagctacctgtttgcccagcagcaccaggtccaccttctccttctctgccagcttggccaggacccgagccacctgcaggggacccaagcgttctgcttctgctgggggcacctccacgtggatacctcggtctgcacccatggccagggcggtacgaatcgtctcctgccaaggacagaggggcttgacttggctgctatcctcagggggacctaggagtctggctcgcagcccctccttcctcagacccaggagtccagggccccatcccctccttcctcagacccaggagtccaggcccccatcccctccttcctcagacccaggagtccgggcccccatcccctccttcctcagacccaggagtccgggcccccatcccctccttcctcagacccaggagtccgggcccccatcccctccttcctcagacccaggagtccgggcccccatcccctccttcctcagacccaggagtccgggcccccatcccctccttcctcagacccaggagtccgggcccccatcccctccttcttcagacccaggagtccaggcccccatcccctccttcctcagacccaggaatccaggctatcagcccatcctccctcagacccaggggtccagacttccagcctcctcctccctcagacccaggagtccaggtcccagcccctccttcctcagacccaggagtccagggccccatcccctccttcctcagacccaggaatccaggcccccatccccttcttcctcagacccaggagtccagggccccatcccctccttcctcagacccaagagtccaggcccccagcccctccttcctcagacccaggagtccaggcccccatccccttcttcctcagacccaggaatccaggctatcagcccatcctccctcagacccaggggtccagacttccagcctcctcctccctcagacccaggagtccaggtcccagcccctcctccgtcagacccaggagtccagccccctccccaagaccttcatcacctggcactgtgcaggcccacagctgacggcgatgacctccttcaccagcttcttctccttgagccgcacagcctcctccaccgcgatctcacagaaggggttcatggagtgcttcacaccatccgtgaccacaccggtcctgtcaggcttcactcggatctgcccagcaggaggggaaggggtggggtcaggaggaaacaggcaagaaggtgggggcctcagcgccaaccctctcccaggctggatgaggacaacgacagcctggaaaggggcagggccttgtccggggtcacacagctccagggacagaactgggttagagtttgtaggcaggggcaggtcaccctgtctccttctctcatccagccattcctgggtaccagggacatctgacttgatcatccctactgttgtcactgctcctctcaggcctgaaagagtgtttctcaaatttacagtatttatggtaacccacagtgagaggtacattttactgtatctccaagtgtatataaatacataatacactgatacataaatacaaatgaggagaagaaaaggaaaaaccagttaggtagacagttaagggtggtcctcagaggagcagcctgcctgaaaaatcacagctacaggcaacaatagagcagcctggggaaaactcaagctgcccagcacagaagccttttgttctttgcgtgactgacaggctcccaggaaaagttccctccccttttcaggcacgtacatggtggtctctgtgggaacttgcacggggaggggcggagcttacctaaaacaaacccacggttacagaaacaagagaagcggagctttgtgcttgcctaaagacgtacccacaactacatagataacggagagttatgcagatagctttacagataagatactcaaacagctacagagatgaaaggagtttcttataaaagcttttggtgtcttttgctgtgcagaagctctttagtttaaccatcagagtgaacaggcaacctacagaatgggagaaaatttttgcagcctactcatctgacaaatggctaatatccagaatctacaatgaactcaaacaaatgtacaagaaaaaaacaaacaaccccatcaaaaagtgggcgaaggatatgaatagacacttctcaaaagaagacatttatgcagccaaaaaacacatgaaaaatgctcatcatcactggccatcagagaaatgcaaatcaaaatcacaatgagataccgtctcacaccagttagaacggcgatcattaaaaagtcaggaaagaacaggtgctggagaggatgtggagaaaaaggaacacttttacactgttggtgggactgtaaactagttcaaccattgtggaagtcggtgtggtgattcctcagggatctagaactagaaataccatttgacccagccatcctattactgggtatatacccaaaggattataaatcatgctgctataaagacacatgcacacatatgtttattgcggcactattcacaatagtaaagacttggaaccaacccaaatgtccaacaatgatagactggattaagaaaatgtggcacatatacaccatggaatactatgcagccataaacaatgatgagttcatgtcctttgtagggacatggatgaagctggaaaccatcattctcagcaaactatcgcaaggacagaaaaccaaacaacgcatgttctcactcataggtgggaattgaacaatgagaacacatggacacaggaaggggaacatcacacaccggggactgtcgtggggtggggggaggggggagggatagcattaggagatatacctaatgctaaaggacgagttactgggtgcagcacaccaacatggcacatataaacacatgtaacaaacctgtacgttgtgcacatgtatcctaaaacttaaagtataataataaaaaataaataaataaataattttttaaaaaaaaagcttttggaatcaactgtaaaaatggcaacccgcttgggcttccctctcctctgtggagagctttcttcttttgcttattaaactttcgctccaacctcaccttttgggtggtctatgctctttaattctcttggttgtgaaacgagctcggataacaccttagacaacgtgaccagtgaccctgacctatttcacaaatgccactgcagtgtaagggtcagtgaccaatactgaccctgcctacacacacaccatactctgacattttctaccctttttcggaaaaatgccagccctctgcctggatgtcatgatcacacatggtcacaacctaatttggaaaacaccagcatgaaagacctctttgctaaacagacaagggaggtaagggaggtgggtggcaaaccccacccatttgcttctgcacatcatttttgtctctcctgggccccactgtgtgcctggctctgagctggatcctggggacaccatcatgtgccagggagagaggcttccggtgtagaccagggtgtagcgtgaaccactaaccactctcctattagtttctctcggctgccgtaacaaatcaccatatatttggtggcttagaatcttacagctctggaggccagaagtccaaagtcagtgtcaccagggtgagaccaaggggtctgcaggccccgggaggaacacgtttcttgcctcctccagcttctgctgacactccctggcttgtggctgcatcgctttatcttcaatgccagcatcctcagctctgtcttcacgtggccttctcctctctctgcgtgtctagtctccctctgtctctctcttataaggactcttgagatggcattcagggcccacctaaataatccaggataatgcccccatctcaagatgcttaatttaatcacatctgcaaagaccctgtttctaatttcttttttttttttttttagatgggctctcgctctgtcgcccaggctggagtacagtggtgaaatctcggctcactgcaacctctgcctcccgggttcaagcaatttgcctgcctcagcctcccaagtagctgggattacaggcatgcatcaccacgcctggctaatttttgtatttttagtagagacagggtttcaccatgttggccaggctggtcttgaactcctgacctcaggtgatctgctctcctcggcctcccaaagtgctgggattacaggcataagccaacatggccagcctgcaaagaccctgtttctaagtgatttccccttctcaggtgccagggattgaaacctggctgttttggagggctattttatttcttggcccaccacaatcctttttttctttctttctttttttttttttttttgagatggagtcttgctctgttgtccaggatggagagcagtggcatgatctcagctcattgcaacctctgcctccccagttcaagcgattctcctgcctcagcctcctgagtagctgtgattacaggtgcccaccaccacgcccagctaattttttgtatttttaatagagacagggtttcactatgttggccaggctggtctcgaactcccgatctctggtgatccacccacctcggcctctcaaaggcaggggattacaggcgtgagccaccgctcctggcccaacctgagtttttataaggtcattctggattcttggtggagaaaattggaaaaggatgagaggaagtggggagagagctgggtggctgtttgtcaccaaagtgagaggtgacagtggctcagacagctgtgacagcagagacagatgcaagaggtttctggaggtgcaactgacaggccatggttcgtgatgggaagatgacaccaaaaaggggcttccagtcagtacatcagccagagccgggaagacggcgagtttggtttggggcacaaatttttaaaaagcctccagggacatccacagaagccttgctagggagctgccccatttggcctggagcctgccctcttcctcttctcccatgtggccgccacccagggcttggccagagcagatctcgggtggcagctgagcctggtgaggacactgggatgctcttgctatttccctgcccctttttctctggggctgtgggtgtaactgttcctcccacaggcaggacagaatccgagatgagaaggtgggacccataaggggcttcccactctggctgtgcctcatggagagggtaacattaaaagatggaggactgagaccgggcgcagtggctcctgtctgtaatcccagaaatttgggaggccaaggtgggaggatcacttgtgcccaggagttggatactagcctgggcaacaggttctacaaacaacaacaacaaaaacaaaaacagctgggcgtggtggctcatgcctgtaatcccagcactttgggaggccaaggtgggcggatcacctgaggtcaagagttcaagaccagcctggccaacatggcaaaaccccatctctactaaaaataaaaataaaataaaaaattagccgggcatggtagtgcacgcctgtaattgcagctactcagaggctggggcagggagaattgcttgaacccaggaggtggaggttgtaatgagccaagattgcgccacggcactccagcctgggcgacagagcaagactccgcctcaaaacaaacaaacaaacaacaacaaaaaaaaaaaaaaaaaaacagccaggtatggtggcacacacctgtagtcccagctactcaggaggctgaggcgggaggatcacctgagcccaggaggtcaagggtgcagtgagccgtgatcatgccactacatgtaacctgggtgacagagcaagacctcatctcaaaaaagaaaaagaaaaagaaaaaggagaaagaggagaaggagctggaagaggagaggaaagagaaagaactgttattttcatctctctcgttgcccaggctggagtgcagaggtgccaccttgccttactgcaacctccacctcccgggctcaggtgatcctcccacttcagcctccccagtagctgggaccacaggcgggcaccatcatgccgggctaatttttttttttttactttttgtagagaaaggatttccccgtgtttcccaggctggtctggaactcctggcctaaagtgatccgcctgcttcagcctaccaaagtgatgggattacaggtgtgagtcgcagtgcctggccttttttcttaaaaaaaaaaacacaacataggagttgcccctttaagacagaaaagaacctcatccacccatcagtaagaggccccaagcttcttgctgtgagtcagggaggcttctgaagggcctcaagccacatcttgctcttgctctggcagaactcccagccctaagctcctgattcccaggctcctgactcctgaggagaaagggtaagaactttccagacacacacacacacacgcacgcacacacacctgaggaaacaaactagctcatcttctcaattaagcttgagttgattttaagcttcaaaaacagtttagttatattacataagtcaggaaacaatggtagggctgaaaaatgatagcttgtttgttttttaaataatgatggctcatgcctgtaatcccagcaccttaggagactgaggaaggaggatcactggagcccaggatttcaagaccagcctgggcaacatagagagacttcatctctaccaaaaaacaaaattagcaggtcatggtggcgtgcacctgtagtcccagctactgaggaggctgaggtgggaggacggcttgaacccaggagggtcgaggctgcagcgagctgtgactgtaccactctagcctgggtgacagagctagaccttgtctcaaaaagaaaaaaaaaaagttttataattgaggtaaatcattcagcattaagtgctggctttctcttaaagagacgacatatccaccaatatcaaaaacagcctcaaagctgggcgtggcggctcacacctgtaatcccagcactttgtggggctgaggtgggtggatcacttgtggtcaggagttcgagaccagcctggccaacatggtaaaaccccatctctactaaaaatacaaaaattagtcgagcgttttagcacatgcctgtaattccagctagttgggaggctgagggaggagaatcacttgaacccgggaggtggaggttgcagtgagcagggatcacatcaatgcactccagcctgggtgacagaccagattctatctcaaaaaaaaaaaaagaaaagaaaaaaaaaatttttttaaaagcagcactgacccatgcagacaacgagtcaagggttttatatgcattaactcgtttgaccatcctagtagcctgtgaggttggttactgccattacctctcattttacagatgaggcaactgaggcacagagaggccaagtaccttggccagggccactgagcatggaagtggcaggaccacgggtctaaccccaaatctgtcttgggaactgtgagactctgaaagaggctacgtgtgcccacggtgttaggagagccagtcttcctatttgttgtccactgcaggcaagagggattttcttctcttctcttttctttctctctttctctctctctctctctctctctttctctttctttttgatacagagtcttgttctgttgcccaggctggggtgcagtagtatgatcttggctcactgcaaactccaccttctgggttcaagcgattctcctgcctcagcctccccagtagctgggactacaggcgcctgccaccacgcctggctaattttttgtatttttagtagagacaaggtctcaccgtgttagccaggatggtctcaatctcctaaccttgtgatccacccgcctcagcctcccaaagtgctgagattacacgtgtgggccaccgcgcccggcccacgcctggctaatttttttatttttagtagagatggggtttcgtcatgttggccaggctggtctcgaactcctgacctcaggtgatccgcccacctcggcctcccaaaatgctggaattacaggtgtgagccaccacgcccggcccaagagggattttataaagtgattttcgacagctcttcctgaacccctgacacagctcaaggacttgtgtggttctgtcctctaggcttttctgtcaagcgagtccctgggcacgtgctagggcactcagcaagcaggacagccaaggccagggagccaccccagtgacagatcactaactcggcggggggcagacagagaactcgtccctgaggtgacatgtgagccccacgtgtgccctgtcagacaaggtggccttgctgagagcaggaggggcaagtgcgtggagcccaaagaggaaaacctgaagaaacaccaggcgctcccagacgagagggtgtggctggtcggggttgggccccgagatggaaacacgttttctgggcctggagtttctatcctgtggggtcatctctaagaaaatgaatcccagataatgaatacaaaattgcccagcctctcctgggtttttttttttttttttttttttgtgagacggagtctccctctgtcacccaggctggagtgcagtggcacgatctcggttcactgcaacctccgcctccctggttcaagcgattcttctgcctcagccccccgagtagctgggactacgggcacgcgccgccatgcccagctaatttttgtatttttagtagagacagagtttcactctgttggctaggatggtcttgaactcctgacctcgtgatccacccacctcagcctcccaaagtgtgtgtttacaggcgtgagccaccaggcccagcctttctcctggggtcttgaaagaggccctgaaggttaagcttcatcagcttcctgtaaaatgtgcccctgaacaggacagggtgttactgagttgccaaatacctattaaaatgttagatacacgcacatacccagaaacatacacacagccggacacacatacacacacacacacacacacacacacacacacacacacacacgaatacactctgagcacagcatttgttatgttttgaataaatgactaactaaacatccattactactactcccaataaaaacacttattgcagctggtcacagtggctcacacctgtaatcccagcacgttgggaggctgaggcgggtggattacctgaggtcaggaggtctagaccagcctggctaacatagcaaaacctcgtttctactaaaaatacaaaaattagccaggcgtggtggctcacacgtgtaatcccagctactcaggaggctgaggcagagttgcttgaacctgggaagtggaggttccagtgagctgagatcatgccactgcactccagcctgggcaacagagatagactccgtctcaaaaaataaaacaaaacaaaccactgtgtgccaggcactgttccaagggcttatttaattttcattacaactcaataaagtagatagtaccatcatccccattgtacagagtagaaaaatgaggcttagagtggtgaagcaatttcctcaaggtcacacagcaggaagtggacgcaggcgctgggcttggagtctgaggtctgcactattctagtagtgaacccactgtctcaggaagcagtgaccacatcaaactgtctcccccacacctggagctcaaattccagaaggggcgacagacaccagagcaatcaataagtaaacaacactgtggattacaaagtgtccacaccagcttccctctggggacaagctgggctctcagagggtgcccctgctcccacctccttcatggagaatgtgagtcactccctccactcagttaggttggctccttgaactttcatctctagcaaacatactttcctctccctttctagttgctaagtataggggaaaacacagcaaaacacagggacctggggcctgtgattttaaggaggcaagcagggaagtcctcccagagaaggtgatgtttgaaaaggaggtgaaagaggtcagggagtgagcacgtgattctgggaacagaggtggatcagacatggcccctctctgcagggagctaccagcctggggatgatggagtagggcagtggggaacatggggtaaacagaggatcccaatccagtctggcgagggctgatggaagcaaatctagggactgcagaagcccccagggatataccaaggcaacctgagggtgtagggtcaggggcttcctggaggaggcgatgccagggagaatcactaaattattattattattattttgagactgagtctagctctgtcacccaggctggagtacagggacacaatcctggctcactgcaacctctgcctcccaggttcaagcgattctcctgcctcagcctcccgagtagctgggactacagatacgtgccaccatgcctggctaatttttttatttttaggagagatggggtttcaccatgttggcctggctggtctcaaactcctgacctcaactgatccactcgcctcagcctcacaaagtgcagggattagaggtgtgagccaccgcgcctggccgagaatcactagattttgatataatccatgagttggagttgggcaggacaaaggacagaaagcagaggtaggagggtggtgctggaagaaggcatggaacgggcaagccgcggcctggtctgtcaggacaggaggagcaggtcacagtggcagaagcacaaagggtaagggagggtccaaggagggaagtggacggctgaagcagaccatgaagaggaggctggaccacaaagcatcccaaatgccaggcagaggggctgcgactctgtcctgagggtgctggggagccacaggcaggctgggagcaggggagagcagggtgagctctgggtgcagaaaggcccctaaggctgggtagaggtgggctgagagggagagactgggagtgagggaggacccgggtgagggtccaggtgagacaatgacaccaagagacaatagggcaagaagggtggggggtggagaactgacagctttgggagaagggaaagagggtgggacagtacccaggtctaatctggtgtttaggaagctggcagggtctgaatcatttatttgttctgaaaaggacatcaacagacacatccagtgagacaggatgtaatgcagggagccctggggcactgcgggaggggaaggcagcaccctctggaaaggacagtagctgattcaacgcggccttcacgcttcccctctgttctctccctgagcacaccagagacatccatgtgccaggctctgtgctgagtgatgctgggaccagagctgagtcaaacgtgggcctgcaccatgggggagacggatccaatcccagacatgccaggcgtggaaggccagggctgggatggagagaagaggcccagggagctgtaggactccaaagatgtgacagtaacgaacagtcagagcagggaggaaaccaagtgttgggtcccaggaccccaagaggaatgtgtctcaaaagggctacaggtgacatccctgtcatgtgctgccagaggcatcattaggacagggggcattgagggagatgggagagcagagtctagagccagacttgcccggggtttcgatcgtaactctgccacttactggctgggagatctgacaggcctcagtttcctcatctatccaatggaattaataatacaaagggtcggccaggcacggtggctcacacctgtaatcccagcactttggggggccgaggcaggcgggtggatcacctgaggtctggagtttgagaccagcctgaccaacatggtgaaaccccatctctactaaaaatacaaaaaattagccaggtgtggtggcacatgcctgtaatcccagctacctgggaggctgaggtaggagaattgcttgaactcgggaggctgaggttgcagtgagccaagactgcgccattgcactccagcctgggcaaaaagagcaaaactccgtctcaaaaaataaaaataaataataaataatacaaagggtactgaaaggactgaatgggttaatctctgcaaaggacttggaacgatgcctgccacgtaagtacccgctaaatgctggctgctatcatcactgacactttcatgctcaagtctggctcctgtaccctcttccccagcccactccctaagcaggcaggggcagtatcagtgtcaactttgtgaccctggttttgcccaccctgaggcctccagggtgccaggccctgcgctaggtaatgctggggacacggaggtaagtccccaggctgatgggaaggacagacatggacagacagtcaccatcttcagtccagttcaggccaagcattgagagaaacgggcctgagagaccgtgtctgattcacctctgtccacaccagcttccctctggggacaacaagccaggcgctgagagcaccctcccccacctctttcatggagaatgtgagctacccccagctcagtcaggttggctccttgaactttcatctctagcaaacacacttctctctccctagctagagcctcctggctcaccctgtggctatggagggtggaaagcagcttctggggccccacaggaccctgtctgactccctctatagcacatttcgggtaatataagagtacaatggtaagtaatgcagcctagtgggtgaaagcagtcagaggaacctggatagaactctcggctctgcccttctctagctgggtgacctctctgtgcctcagtttctccgtgcattaaacagggaccgtgacttcttccagtgggtaagaaatagagaaagcaactcactctgaacagttatcaagagagtgaatccagaacgagggaaaagagaacatggccgtgaccccggagggatcggatgttagaacttcactcttggatttttgccctcaggtgactttgacgtttgggggttaaagcggcagaggtcgggggttacgagaagacccccacccagtgtgcgctcgtggccccggaagcacacggctgcgggactcagggatgtgggagaggggggcccgatcaccttcacggcgtagtcgatgaccctcttgacagctacgagcacgcgcagctccgccatcttcccgccgcagccacttacagggtcagcccgcaccctcagcggctcagtccagaagccccaccacccccgccccccgcgcccctctctgcgcctgcgcgcagcacggtcagccagtcaaccgctgcagagcccgcctccccgacagaggaccaatcgagaggccggaaggaagggaggtgtggcaagcaatgcaaaccaatgggaagcggatctcggggagcgagcgggacctggagagagaaggaaaggcctggcggagagggcagggcagagaactaggggaaaggtcgtgcactggagggaagcgcgcccggagtttatagatcctcccggtcctataaacacttcccggtatccccggatctgctctccctctccagatcccccacttcttcccggcctctccaagtcgcggtactcgtattcccacgcctctgaatcctcgcgcgtcggtctctccactctctccatccccgtgttccctgtcccttccatatccgtatcctcccctgtccgtgtctctacttcacctccatgtcgtccccacagcctctccacaccctctccaaaggcccacgtcccctcctggccccgcccctcccacatgtccctgttcccatcccaatccatggagacttgtgtctccatgtctgtgtctccctgtctccacgttccctatgagttcatgtccttatgtcttccctgagcctctatgcaaccccgtgcctgcgtccccacgacccgcagaaaagcacgcggagccgcagcgctaaaaaaagccgttcctttattctgccccaggcaggctgcagtcacagacacacggggaatccactgatggcgtcggtgctctgcatgatcatgtctgccagcagaaagcagaagcctggggggacgggggtgcggagcagggagaggaaggtgggccctggggcggatggccgggagggccccggggactggggtttggggctccaagggggtctctgccgggtctgcgggagtcgttagtgtgttggggagtccccgagaggtccccggggtttcctgggagggcagctggggagcctctggggtgagggtcttctgggcagtctcctccaccctcttcccgctgtccagtttacccgcgagaattgagaagggtaaggccagccacccagaaaaataggaccaagagaagaagacgttgttcttccacgcattcttcacggtgtagcctatcaaggcggtcagcagcagcagtcctgggccccgcccagccgcaagatgagctagctgggcctggtgggggctgcacccaggccacgccccttcagacccgcccccttctatcagaccacgcctatcgcctctcagcccgcccctggcccaggccccttcctgctcctcccgctctgaactctgtctcgagccccgcccacctctctcggcttcttccagccctgcccctcggatcctggccgagtacctcaagcccctcccctggcgaccaggcccctccatcacccagggcccgcccctgcctgcccgcctggggcggtctgcagtctcaccgccgaggaagaggaaggcgctcgtggtctggccccgcagcgactcgccctcgtcgcaccgaatccgcagtcccatcaccatgcccaccacgccgacacccaccgccagcaccatgcacgccacagtcaccgccagcgtggctggggagagcgggcgcatcagcccccgcgggcgccgccccagtcactacgggttcggccgcaaccggaagctctcccgtctcctgcccccaacccggtgtgtggccaggagccgagctccaccgaccgggagtcaggcgtttggattgagacttggaggtcacatcaggacctgcggttactgccgctaccaggacggggagggggtcggggacaagcccacaagtcgaggggcggggttcgtggcggcctcggccgacaagggacagctgcaactgagcccggggtggaaggggtgggcgtctcgccatgggcccagctgtgtgtcccgagccctgggggtctgaaatgccctctgacatctgggcgggcggagcctcactctggcaggggatgctggagcagatgccgtggttgcattcctgccacaggccactgtggccctcttgttggcgggtccagtagttggtggccgtggagagcaccatgaggacgttggccacgaggctgagcagaatgcccccactctggaggctccgcttcacccccatgccactgaggctgcagccgggggccacaagggcaggatgggcccaggcctttcctaccccgaggcccccagctgaggagcccgcttcctccacactcctcccctggtactcctgcctgaggtccctgcttctggggacctggagacccccctccctcaacaaccctgcctgaggatccacaacctcctccctccagacctcgttccccttactggagaccttgagacttcccctgagaggcctctgagaccttcaccacaggctttgctgtgaggaacctgtcttcccagagacctcccccgacagccgaacgccctttcagcccagcctgttcaatgtcctccccagacacccctccacacaggcccacctaagtgactcacacccagtgccctagggctccttagacacagagcccagagagacggggggagggaggctgggtctctgtgaggccaggggttccagaaccccctcccccagtggctgtttaaagggataatcactccccccaccaccatcgcatacacccccgcagctctcaactgagtgactgcttagattcagatctcagctttgggggccgttacatgataggccgagtccttcttttatcattattatcattattattttttgagatggagtcttgctctgtcacccaggctggagcgcagtggcacgatctcggctcactgcaacctccacctcctgggttcaagcaattcttctgcctcagcctcacaagtagctgggactgcaggcgcacaccaccacatctggctaatttttgtatttttagtagagacggggtttcaccatattggccaggctggtcttggactcctgaccttgtgatctgcctgcctcagcctcccaaagtgctgggattacaggcgtgagccatctctctctcccaggctggagtgcagtggcaccatcacagctcactgcagccttgaactcctgggctcaaggaaacctcctgcctcggcctcctgagtagctgggactacaggcatgtgccaccacacctggctaattttcttaagattttttgtagagatggggtcttgctatgttgcccaatctgatctcaaactcttgggctcaagcgatcctcctaccttggcctcccaaaatgctgacattatggatgtgagccaccactcccagccctttcttagaaacttctctttcccttggccgggtgcgcagtggctcacgcctgtaatcccagcactttaggaggccgaggcgggcagatcacctgaagtcaggggtttgagacaagcctgaccaacatggcaaaaccccgtctctactaaaaatacaaaaattagccaggctagccgggggtgatggcaggtgcctataatcccagctactggggatgcgaggcaggagaatcacttgaacccgggaggtggaggttgcagttagctgagatcgcgccattgcattctagcctgggcgacagagcaagactccatctcaaaaaaaaaaaaaaaaagacaaaattagccaggtatggtggcgcacgcctgtaatcccagctactcaagaggctgagggaggagaattgcttgaacccgggaggcagaggttgcagtgagccaagatcacaccactgcactccagcctgggtgatagaacaagactccgtctcaaaaaaaaaaaacaaccttctcttcccttgacattctaggcaccgcagaagctctccaggtccccagctgtctgactgcagacttctgctcctctgccttctccccttcacttgtaaatctgggtatcccttgaagctccaccctgcactctcttgccaggcaagcctcctcacggccaaagtttcagtgctccttaatgctccatccaaaactccatctccaacccaaggtctctcccctgagcctgactcaagttctcacctgctcctggctgcccctcagggccttaatagtcaaccatattccaactgagcttagtgtcttccaccatattagggatggccctgccatcccatccagttcatcgagccagacccttgggcactgtcctcaccttcttcttgcccttcaccctgaaaagccttgggtccctaagtcctgctcctcctgcccctgaatctgtctggctcattccctcctttcctggtcccaggtcaggcctcatcatgtcccacctattgcattgccaagttcctccctcaccttctggcctcccctccatgtctacaggggggtctttctggcacccagagctgacactgtccctcccctgcccacaatttttctcccaactccccatcatgttcaagagaaagtccagcatgacattagaggccacagcccccacctgcctctccctcttcattttccatcccccgccccccacattctatatcctgaccctaaattaccgatcttcatccccacaagactcctgacttttctgcacgttcatctttgggcccctctgcctggatattacctttccctggcccttaagaagctcctaaatgttctctctccagaaaagtcgtctccatccctccacaatatggtcagtctttttccggcattctccctgcactgggactgctgtctggcctgtattaactgcttctggtctgtaagtgcctcctccccaccaccccacagactgagcccctgctgggcagggcctgggtctgacccgtgccagtgtccccagcatggggaaatgtgcaaagagaactgactgagtgcaaggaagggctgagttctggcaagggggacaaaatcagagagggagagagaaggaaagagagccagctaaagggagaaagacacagggaggaagaaaagtgctggagaaggggagacatagacacgggttggagcctgtgtccacacgggccgggcactcgtactgggcaggagcgccctgcaggctggtcggcctggtgggccctcaccttcccttggtgcccagctcctaccatggagctggcagacagttggcttatgtcttggcagaattaatctcaaaataaccagattccagccaaattttgttgaatgaatgaagaaacaagaggaggggctggggaagggctggaagggcgggcagatgtgggaccagactttcccgaggctccagatgaggcctttggaatacaacgctcaaaactcatcttgccgctcttgccttctgctcacaaggtttcatagccaggacggggaccgccacagtgagcacccaggctcagggcacctggggagccagaaagagtttaagcacttgcccctgccctctgtcctcagggaccccaactggaccctcccaaagctccccagggcagtgggcaggatagtcacctgtacagagcaagaggatagctgagacccagcccaggtagaaggaccaggagaagaaggtctggatctgggggtgtggaggctggtcccaccgctcgctggtgtacaccgccatggccaccaccatggagatggctggggacaaggacaagagagatggctcagctcctcggcaggaattcgctggctcgcgatgccccagtccagtccagagtccttacctgcagcaaaggctgcggtggttgagacaagcgggccgtggcctggggggaacagtgaggggaagcaggacaggaccaggaagctcacggacaccagggcccacagaacagccataatgctgaaggtctgcgtcacgtggatgtagcctgatcgggagaagaccactgagcacccatccccgctggcaacccctctgtaggacacccattccccttacctgatatgatgtccccatgccctgttggccagaggcccgagtgagctgagtgggtgggacccacagcctcaaaccagaaatcggtgctcaaagcaatcaggcagaacatcaggcccagggagccccccagcagggccagggaccggcagagctccatggggataagctcagggcttctgggtcctggaggaggaagaggctgctgatcagactcttgaatctcagagagaaggaggctgtgcacccagactcctgggtccttagagcccaagaaagagagaacagcaagcagttggggcagtgaggggtcctgcgctttgtcacatgaggctggtttggtttcacacagttcccggtagcttttcacataccctcccttcctggattgcacaggcaacgtcctccctcccctccctggggtccagttccccgcttagtgtgtgatgggggagggcactgagggtgtcagatcatcagtggtttgggcggtggtttagtacttgcctctgtcacagattctacaactcccacccatggaaccttcaacaccaagtcggggcttcctggaagaggtgagagagagaggcttgggggccctgaggtgggaggaagccaatcaggctagggtgtacattaagggggagggcagatgtggctggaggggacagctggggatgtgtcatgctttcctgtgggttatgcagtcttccattctgggagaggaagtccccaagtctagggtctctactgaaggaggggacttgggagttagaactcctggggcttaaggaggaaggagctgggggcctgaactccaggtcctgagggaggaagaggcgggcaggagctcagaatcctgggccccagtttggagcatatgccaagggcaggcaaacagcagagaatcacaattctgaaaggtttgcagagagtcagacatacccacatcctcatctgattaatgagttcagtggcatccctgcttgggtgggggctccagcctggtggcctttatcaccaggatcggggggcctagggggtgttgggggacataaggattttggtttagggttctccagccccccaaacgctagcctcttccatccacaccatcaggtcctggcaacacctcatctacgagcaggtataaggtgacggtaccacagcccaggtagaaggcccaggaaaacttgacctctgtgaaacggtgatatggttagggtttgtgtccctacccaaatcgcaccttgaattgtgtccccataatcctcacgtgtctaggtagagaccaggtggaggtaattgaatcatggggccggcttcccccatgctgttcttgtgatagtgagtgagttttcacaagatatggtgtttttttaaggggctcttcctgccttcgcttggccttcttcctgccactctgtgaagacagtggcttgcttccccttcaccttccaccatgattgtaagtttcctgaggcctccccagccatgctgaactgtgaatcaaataaacctctttcctttataaattacccagtctcaggcatttgttgttgttgttgttgttgtttgagacagagtctcactcttgtcactcaggctggagggcagtggcaaaatctcggctcactgcaatctccacctcccaggttcaagcagttctcctgcttcagcctcccaagtagctgggattacaggtgcccgccaccacacccagctaatttttgtatttttagtagatttcaggtttagtagattttcgggttttcaccatgttggacaggctggtctttaactcctgacctcaggtgatctgcccaccttggcctcccaaagtgttgggattacaggtgtgagccaccacgcccggccaggcagttatttatagcagtgtgagaatagactaatacatagggagtagtctggaagaggacctctgtcttggagatgaactggtccagcagtcccaggacagctggcaaatgtggagaatgggaaatgacctggaagactggttcctctcctttattggagagactcagatcggcagcccccatccttcactcagatctgcaccactctgagaacacatttatgagcacaggctcccagaggtggcagaggccatgagcaggccaggtctccggaaaacctgccatggtgtgcagtgagtagcaggtcagagcacacagcctatctatctgtgaccctgaccccctcccaaacccaaagccatccttaaccccaaacccaactccatccccaaactcagtatcaagcccagttccaaccacaaattcaacccatccctatccccaaagttaaccctattcccattcctgaacacaactccatacccaatcccatccctattcgtaatctccaccctagctccaacccccatcctcaaatagaactccattctcagtcccaactacacactcaaccccatcccccgattcgcccccatccccaaacctaacgtcattctaattcccaaactcaacatcatccttattcccagttccaacccttatacccttcccaccctcaaatctaactccattctcattctgaaaccccaccctatctccaaaccaaacccctctccattattaaccccagcccctactccaaacccaaccccatcctcttcctgaaacttgaccctattctcattcccatcccaaccctttttttttttttgagatggagtctcactctgtcacccaggctggagtacagtggcatgatcttggctcactgcaacctccgcctcctgggtttaagtgattcctgtgcctcagcctcctgagtagctggggttatggttgtacgccaccacaccaggctaattttttttttttttttgtatttttagtagaaatggggttttgccatgttggccaggctggtcttgaactcctgacctcaggtgatccacctgcctcagcctcccacagtgctgagattacaggagtgagccactgcgcccagccactgtcttttcattcttctctgcaacctctataattcatacctaactccgaccattttcattctcctttcacctccaggtccaagcctgtaacctcatttctcatctccccaagtgggtcccactaccaccaccatcacacccatgcatgcatgcatacacagaggtgacctgtacctggctccagtgagtctctgcacatgtaggtatcacaggctgatcacaggcccaggccctctgacagacaccacaagccagtaagagcgggtgagtgaaggtcatcttttttttttttttttttttttttttttgagacgcagtttcacttttgttgctcaggctggagtgcaatggcatgatcggggctcacagcaacctctgcctcccaggttcaagagatcctcctgcctcagcctcctaagtaactaggattacaggcatgcgccaccatgcccggctgactttctatttttagtagagacggggtttctccacgttggtcaggctggtctcgaactcctgacctcaggtgatccacctgcttcagcctcccaaagtgctggaattacaggcgtgagtgaccgcacccagccagccaagaccatctcttaagagcacaaaggcaaggcagctggggccttgaagacagaattgctcgcaggatctccagcagctttctcaaccagatgtggtctgtggttgccagaggaaaaccccaggcctccttctgaagcttttcctgagagctctgtgaaaggaaaatcttggggccccaaaattactgagctaaaggggaaagtcaggctgggaacagctcagggcaaacctgcctctcattctattcaaagtcatccctctgctcactgagatcgatgcatatctgattgcctcctttggaaaggcttatcagaaactcaaaagaggccatgcctgtaatcccagcactttaggaggcctaagcaggtggatcacctgaggttatgagttcaaaaccagcctggccaacatggtgaaaccccatctctactaaaaatacaaaaattagccgggcatggtggtgcacgcctgtagtctcagactcaggagactgaggtaggagaatcacttgaacccaggaggtggaggttgcagtaagccgagattgtgccactgcactctagcctgggcaacagagttagactccatctaggaaaaaagaaactcaaagaatgcaacaatttgtctctcacctacctgtaacgtggaatccccctccctgctttgagttgtccccaccttcctggatgcaccaatgtacttcttacatctattgattgatatgtcatgtctccctaaaatgtatagaaccaagctgtgccccgaccaccttgggcacatgtcgtcaggacatcctgaggctgtgtcacgggcgcatgtcctcaactttggcaaaataaactttctattgttcttttttttgagatggaatctcgctctgttgcccaggctggagtgcagtggcacgatctcggctcactgcaagctccgcctcccgggttcacgccattctcctgcctcagcctcctgagtagctgtgactacatggcaaaataaactttctaaattaactgagacctgtctcagattttcggggttcacagctcacgtcgcctgcttggccacttggttctcttaggtctctgtcagtcttgtctaagcactgtcagtttttttgaatcacccaggtctcttccaactttctccagccccttccaacctctcccgggcttgaaagctcctcagtagcccccatctgccacggaagaccccaaaaaattagctgggagtggtggcgtgcacctgtaattccagctactcgggaggctgaggcaggagaatcgcttgaacccgggagtcagaagttgcagtgagccaagatcgcaccaccgtactccagcctgggtgacagagtgagactccatctcaaaaaaaataaaataaaataaaatttaaaaagactaatcctcaattaacctacgttctattaaagaaatgaatgctaatggtaaacagttattatggaaggcatcatcatttctattgaggtgcactctagtcataatatttaatggctattataatgataaaaagatattaaatctcagtatcattagagtacatttcaataaataatactttatgtaagtcaataaacagcacttactttatgtaagtcagttggcctgaataaagatttattgttcaacaaatgttcttttgagtgattaccatgtgccaggtgctgtctttgaggatttacaggaaaccaaaagcagacacaggccagctggggtggctcacgcatgtgatcccagcacttcgggaggccaaggtgggaggatcacttgagaccagtagacagagaccagtctaggcaacataaggagaccccatctctacaaaaaattaaaaaattacccaggcatagtgggtggtgcatgcctgtagtcttagctgctcaggaggctgaggtgggaggctcagttgagcctgggaggtggaggctgcagtgagctgtgatcacgccactgcattgtagcctgggcaagagtgagaccctgtctcaaaaaaaaaaaaaaaaaaaaaaagccaacattgaatcccaaagttgttggcttgagtagctggataaaaatggggttgtttggccgggcgtggtggctcacacctgtaatcccagcactttgggaggccgaggcgggcggatcacgaggtcaggagtttgagactagcctggccaacatggtgaaaccccgtctccactaaaaatacaaaaattagctgggcgtggtggcagacgcctgtaatcccagctacttgggaggctgaggcaggagaatcacttgaacccaggaggggaggcggaggttgcagtgagccgagattgcaccactgcactccagcctgggcaacagggcgagactccatctcaaaaaaacaaataagtaaaataaaaaatggggttgccatttcctaagatggggaagaccatgggaggaacacataggctgtgtgtgagatcaggaacttatttttggatatgtgagattggagatgcctcttcttttcaagtgggaatgttgagtaagtaagttgagcaggtaagttggagtcctgagtctggagtcataattatatcattattattgctagagtaagcccctataaatatgattactagaataagtctcggcaaatatttctatttaaataggcctcaataaattattagagaaatcttcaattgtcattattattagagaaaacctctataaatacagtatttttatttgaggaggccccagtaaatattattttagggaataagcctctataaacataacatttattagcatagctgtagtaaatagtctgattagaatcagccttatgaaatagtcttatgatagacatcagtaaatctcatggcagttagcaaccatttattttctttttctttttcttttttattttgagacatagtcttactctcgctcaggctggagtgcagtggtgctatcacagctcactgcaacctccgtctcctcggactccagcgaccctcccacctcagcctcctgagtagctgggacaggcacacaccaacatgcccagctaatttttttttttttttttttttttgtagagatggggttttctcatgttgcctgggggactcctgggcttgagcaatccacctgccttggttttccaaagtgctgggattaccggtgtgagacaccacacccagccagcatcaattaatagaatgaattactaatgagtgaatgaagagaagatcacggtcatgaatggtgtgtgaagagcaggtgccggaggtaaggctcagggttctggtgtttcctttgaagggacgcatcaggggaggagagaggaggctggggagagccaactggaggcggggtgggcagggagttttttcagagatcttttcatttgtccgattatcctacacatccatatcctggaagttgaactgtggtgagctcctggacacggactgttgattcatctctgttcccctccgtgcagaaactgagaaggtcaggcctccataatacagcacccctgggccgggtgcagtggctcacgcctgtaatcccagcactttgggaggcagaggtgggtggatcatctgaagtcaggaattcgagaccagcctggccaacatggtgaaaccccatctctactaaaaatacaaaaagtaaccaggagtggtagtgggcccctgtaatcccagctacttgggaagctgaggcaggaaaatcacttgaacccaggaggcagaggttgcggtgagctgagatcgcaccattgcaccccagcctgggcaacaaaggcgaaactccgtctcaaaacaatgaagacaacaaccacaagaaaaacacacaaaaaagcacccctgcccacacccaccacccttacagctgtttctccccatcctagtccctcaagtattaacactttagtagtttcacatcagttttattaggccccagaaagttgctctaatggatagtccatttttctaacaacctgccaggcagacggggacttgagtcttctcagctccctcccatgggccctattcttcctccttccagcctaggaccaggagtcagcctccccccacaaacccacagtccagaactgagccccctcattcccctaggaaccaggatttcaggcctctagaccctcctcctcctcttcagtggcctcactttaacttccagatgaagttgggggacacatttgggctcagcggggtgtagacaggcgccggcattcatgcacccggtaggcgcacatgtagaaaatccctgcatgagaagaagttcaaattcaccccctcaaacctcccccagctccatttccaccccaagagagcccaacaccctactctctttctccctgggtatccccgaccccagactccataggcctggagtcttcctcctgacccagtgctgtgggactcatgtgggacaccctgtcatcttccactctatctgctgcccactctgccccaggcactgaccttcccaccccttgcccccagtacctgcgaagaacgtcatgagcactgccacccagcccaggatgtaggaccaggaaaagcgccagtccccaaagcggcggcccaggaagctgacggtgactccagtgtagatggccaaggccaacacgacgaaaagggctggggagagagggcgggaggatgcaggtgggactaaggctgggtgtgattttggaggtgggcagagagctgatgatgggggtgggaactaagattggggaaaggggtggaaatgggttgggggtggggataggagtgaggataggggttgagttgaaattaggggtaaagatgattgggggataggtttgggatggggttggacacgcttgtgttttataatgtaattggccattgtctctggttcctgggagggagaaacaatatttggaacttcctgagtaataggagggtctttgttattcttgagcctcttgggcccaacctgagtttatggtaatgagatgagatgactcagggttgggtgtggttgtcagaaaaaccaaccaggtcaggcacagtgactcatgcgtgtcatcccaacactttgggaggctgagtagggtggatcacttgaggtcaggagatcaagatcagcctggtcaacatggtgaaaccccgtctctactaaaaatacaataaaaaaaaattagctgggtgtggtggtgggtgcctgtaatcccagctactcaggaggctgaggcaggagaatcacttgaacccgggaggggaggtggaggttgcagtgagctgagatcgagccactacactccagcctgggtgacagagtgagactccatctcaaaaaaggagaacaaaaaagaaagaaagaaagaccgaccatgatatgttgaggctctgaaccacttgatatcagggaagaaaggaagttggaaactgcattccatcaatgaccaacgattcaatcagtcatgcctattttacaagactccaataaaacctctggacactgaagctcagtggcgctccctattggtgaaaacatctgtgtgctgggagggtgatccctggctccacaggaagaaggcttggaagctctgcattttgggctctcctagactctgccctctgtgtctcttcatttgcttggacctgagttgtgtcctctataaggaaactataactgtaagtatagcactttcctgcattctatgagttattccagcaatttttgttgttgttattgttgttgttgtttttgttgagacagagtctcgctctgtcgcccaggctggagtgcagtggcacaatcccagctcactgcaagctccgcctcctgagttcatgccattctcctgcctcagcctcccaagtagctgggaccacaggcgcccgacaccacgcctggctaattttgttttgtatttttagtagagatggggtttcgccatgttggccaggctagtctcaaactcctgacctagtgatccacctgcctcggcctcccaaagtgctggaattacgggcgtgagccatcgcacccggcctccagcaaatttttgaatctgagtgggtcttgggaacctcctagtttgtagccagtggatcaaaagcatgggtggcccaggcaccctgcttgcagcttgtagctgaggtggaagcagtcttgctagggactgtggtcttaacctgtggagtcaaacacaaattttaggtgattcatgccagaactgaactgtagtacaccagctagtgtcagaatagactggaactagaaatagtcatgaggttggttttgagtgtggggatgggattagggtggggtggggttgagtgtgaggaggagtaaggggtgagaatggtgttgaggggtggggacagattggggtttgagatgagagcgaggagaggggtagggagagggtgggcttactcacttgaggaaaaaaacatgatgccagcagagaagggccgggagatgcgggagaaggtaggctgatgagcgaaggccatgatgcccatgatgatgccggagatggcgcatagggcagacaggatcatgaaggcccgggtggcattccagtatgctgtgggagcaccccatggtcattcccacacctcccctgctctaagtgagagatgctgctacctctgagatgaaaatgccttgcccctttccatatccctaacccagctcatccttcccttctttgcaaatgccctcttcttcacctggcaaactcctactcatcctccaaagcacagctcccgtgacccatcctctaggaagcatctccccacccctcagtcatcatcttcacccacggctaagggttgtgactctctttgtctgtctccccctccagcctgattgctccttgaagacaggcggtgggttggttctgtgtcataaacacccccaccacacatttggtttgcattctggccttgggaaatgtttgttgaatgaatgaatgaatgaatgctgattccttatattttcctactaattactattctctctcacatttctttttttttcttttctttttttttttttttttttttttttgagaccgagtcttcctctgccacccaggctgaagtgctgtggcacaatctcagctcactgcagcctccacctctgaggttcaaacgattctccttcctcagggtcccgagtagctgggactacaggtgcgcaccaccatgcccggataatttttgtatttttagtagagacggcattttgccatgttggccaggctggtctcaaactcctggccccaagtgatccacctgccttggcctcccaaagtgctgagattacaggtgtgagccactgcgcccagcctactctttcatttattttatactacttgcttatatctgaaaatgtcctatttacttgtttttaacttatttataatgtctgtctctcctcagtaaatccttagctctcaaggacaagcaccttgctttctcattcaccactgtgtccccagcacctacacctggtgcataataggtgcccaataaatgcgtgaaatgaattaatgttgagcaccggggccattcttctcttgtgctttgcccagggatggcccctcaggaaagataataataatctcttcatcctttagcaacggctaactatatgccaggctcgctacccaggtgtgatgttgtttattcctccagagccctactctataagtaccatttttatgcttctttttcaagtgaagaaatggaggcccagagaggtaaagtgacttgcccgaagtctcataattagaaacagggctggagtcagaatccaagctccaaggcccacgctcctaactgcttggctattctgtctgctggagcacctgggaaatggtgcacctcaaaccttgcatcttgccattgaaaagtaaaaagtctaggatctttgtaaaacccagtcttctgccttgtagaagcctcggtgagagaaattcctggctgtttctccatggattttatgggttatgcctttctgtcccccgcctcaaatgtttatgttgaaattgtaactagtgccttagaatggtaacttatttggcaatagagtctttgcaaatataattagttaagacgagatcatgctagagtagggtggggctctaatccaaagactgggctgggtgtggtggctcctgcccagtgtaatcccagcactttgggaagccaaggcaggtggatcacctgaggtcaggagtttgagaccagcctagccaaaatggagaaaccctgtctctactaaaaatacaaaaattagccaggcttggtggtgggcacctgtaatcccagctactcaggaggctgaggcaggagaatcacttgaacccgggaggtggaggttgcagtgagccaagatcattccactgccctccagcctgggtggcagagcgagactccaactcaaaaacaaaacaaaacataaaacaaagactgccgtccttataaaaagaggaatctggacacagacatgcttttaggaaaaatgccatgtgtgaggaaggtagaaattggggtgatgcatctccaaaccaagaaacaccaaagattcccagaaaatcaccagaagccagggagggagggacatggaacagattctccctcacagccctcagaaggaactgattttgcccacatcttcatctcggcctccagaactgtgagacaacacgtttctgttgttcaagccacccagtctgtggggcttttttatggcatccctagcacactaattcaggctggtcacagcggctcaggcctggaatcccagcactttgggaggccgaggcaggaggattgcttgaggccaggagggtttctttttgattatttattttatcttattattattttttgagacagggtcttgctctgtcacccaggctggagtgcagtggctctatcttagctcactgcagccttaaacttctgggctcaagtgatcctcccacttcagccttctgagcagctggggccacgggagcacaccaccacgcccagctaattttttattttttgttgagatggggtctccttacgttgcacaggctggtctcaaacacctaggctcaagtgatcctcctacctcagcctcccgaagtgctgggattccaggctgagccaccacgtccatctgaagccgggagtttgaaacaagcctgggcaatacagtgagatgctgtctctacaaaaatcaaatcaaatgaaataatgaggccaagttcggtggctcatgcctataatcccagcactttgggaggccgaggcgggtggatcacctgaggtcaggagttcgagaccagcctggccaacatggtcaaatcctgtctctactaaaatacaaaaattagccaggcatggttttgggcgcctgtaatcccagctactcgggaggctgaggcaaggagaattgcttgaacccaggaggcagaggttacagtgagccgagatagtgccattgcactctggcaggggtgacagagcgagactctgtctgaaacaaaacaaaacaaaacaaaaacaaacaaacgaaaaaacgaaagaccttcaccaaggctccctgtctcctgcatccctggcagagataagacagagaggtggctcagggctgtccctcggggaattcccagcccgaagcaggagaaatgtagaagtgtcacaaatgagacagccagaaaggagaaggatgtgtggagtcaggcagagcggactctgaagctgatggcccaaggcaagtcttttcacttctccctgcctcagtctacctctccagcaaacaggcatcgtcctgcctctctctcagggctggctccgggagagatgagtgggcgaagtctcccatgcctgtcacgtccggcactcagtgacgcttagctcttcttctcagctactcaagaggatgtttgaattttgagatcaaatctcatgtctcactcttacatacaattgaactgcccgtagtgttgttggggatggaagtgagtttatccatgtaaagtgcttagaatagcacatagggcatagtaagcactcaatcaatgccagttattattattactgttactagtagtaatacacaatatattatatattattaattaatttttatttattttttagacagagtcttcgtctgttgtccaggctggagtgcagtggtgccatctgggcccactgcagtctccgcctcccaggttcaagcgattttcctgcctcagcctcctgagtagctgggattacaggtgctcaccaccatgcctggctaatttttgtatttttagtagagaccgggtttcaccttttttgccaggctaatcttgaactcctgacctcaggtgatccgcccacctcagcctcccgaagtgctgggattacagacgtgagccaccacgcctggccaaatttattaatatgttatataataagtgtgcaatataatatactctacattattaatttattatataatatattgtataatatatacattattaatttattatataatgtcatgacatatactatttattagataatgaatgtgtaatataatggattctacatcatatataatatattacatgtgcattacttatataatatgtagcatattatatacaatatattatgtattagtaatttattatataatagaggtgcatgtataatacactatactgtatattattgtctatatgtagttatatataatacatcataaattatatgtaataatataaattgcatatattacacataatatagtatacattaacttaatatattatagatgctatgcagcaagcaatatactatatatctctatgtatctctctatctatggcctggcacattataagtaggcaaaaatactttatgctactttatgcagtatttagcaaattcagtatccaccagtacctaacatagttcttggtccatagtacatatttagaaaatgctgtttcgtgacactagccccaattgctgtgcatgacacctctgaagcgtcaggaaatgccacctctcccaacttaaccttcaaaccagcaccccgtgaaactgcagctagaaaacaaccctgtagtcccagttctgccccctccatgctgagtgaccttgggttgctccctttccctctttgagccgcagagttctccatctggaatacaggtgtccttgggccccgaggtccgccctgctctttccccaggcgcggcctggaccctggccggggggctcaccgatgctgtctgtctgcaggtagcacttgttgcccaggcagtaccgccacaggccctggtgggcgaaggaccctgacagccggtactgcatccagtggtctgttgccatggccaccaccaggaggatggtccccacccaggcacagaacaggccaccacccatgaagctgtacatggtgatctgtggggaaggggagagatgggattgggagctgaattcccgggacttgaagggaggaactggggggagagagggctcaggagtgggatgccaagtgcttgggagaaggagatggagacctagacgcctgggtcctgggcgaggaggggactggagcccggactcctgggtctgagggaggaggatggtagggatcctggaaagacaacagggagagcggggctgggttctgggaagaaaaggccgggggcctggacttccaggttctgagcaaggaataggctggaggcctagcttcctgagtcctaggtgagaaggggcccaggagcctggattcctgggtggtgggtaaggaaggggctaggggctagggggtaggacaccaggtcctgggagaagaaggagctgggaccctagactcctgggacttggggaagagggggctacaggtctcacgcctggtgcctacctgagtggcagagcctgcccgagccctccttctgccacggcccctctgtgcagactgagctgagcctggtcactggcctctttgcccccttaggttccccaaatcccttaagcctccctacacaatggtcccactacccagcagcttccagcaggcagaaatgcagcggtggcagaggcctcaaatggaattcgctgaagcaggcatccagggggctccccccacccactcactgacctctgtgaccctccccggaacccaataccttgtcgccagccttgctcaaagcaaccctggctttgtccgagctgtgtaagcacgcacacacgcacacacacacacacacacgggcgcgcgcacacacgcaagattcagggagagtcatgcgtttattgttcaaccagggctttctacctgaagagcaggcagtggggtggggagtcacaggtgtctgggtatgtggggccaatgcggttctttgtggggatggacacagggctgtggctgaggttgaggatggagctctttggggctgtagattcagaggacattaaagatgggctgaggtacacaggcaatgaggagaaaggggttggtaaagagggtgggttagggttgaggcgcagaagtggagctgggactggtgacagggatgggaatgaatgggtttgggaacagggtattgagagtggggaagagagaggcaggtaggagtggctttgggattagggagaggatagggaatggggttggaggagccctgggggttgagaatgaggtaaggattgtggttgtggttggggatggcattgggaatggggttgaggccatcaaggagacaggtttgggtacgaggtttaggattttcttctcacttgggattcaggtgacttaggtcaggttcaccaagtgcctcacaggagctactcctgggattgtggttttggggagaggggaggatggaagatgtttcttggggttcttctgacagggctgagatcactctgggccccaggaaaaccctcctgggtgactgcaatctcaggtgcctgaccctccaaggtcctagtactctgtctcccagtcctcagcagccagtggtgtttccaggggtggctctggacctcgagcttctttcttcccatcctgggcaggcagtgttggtggtgatggcagtgtcattggtggggtcctggggccagccccagggccccccgcccggcccctctctggctgctcagctctcccaaggccccgtcgatgcaggcctcggccccagcctggcctgtgcctgacttcccagcctccgcgtcccctgggaggcctcctaactgcccccggctgggagtggcctgcctgggagcagcaggggcaagagggcaaggcctgttggaaggtgtaggcccccagcagggcgctgtgcaggaggcaggagagggtgtccaggcgtatgggcacggtgacagaggccacgctctccgggagccccaggtgggtggggtctgtggagttcaggagcaagggtggaggggctgggagaggcgcagggggccatggctcggtcccagatgacggcagggacaggttgttcctagaacaacaaaaagacaggtcagtggggctcagcgtctccgtactttcttgtttctcgctgccaggctgtctctgcacctctgcagaaggcagccatctctccatcctcagtgcccacctgtgacttcctcccccgcttctctctttttgtttctaacccgggtctctctaaagaaacagacagctctgccatgaacttcggcaccagacagaactcagttccaattcctggtggcctcgcttttggtggtgtatctttggacaaatcattttcctattccgaaccttaatttgtttatagtcacagatggctttggatggtatcaaaggtgcgtatgacagcgctgggtctggtaagtgctaaaacagtggacagctacgatttctccagccttctggggatccctggagtcttcacatttcttggtttattcttggaaatttctgttcgatgagtatctgtttctagctcttttttttttttgagatggggtttcactcttgttgcccagactggagtgcaatggcgctaacttggctcaacgcaacctctgcctctcgggttcaagcgattctcctgcctcagcctgtcgagtacctgggattacaggcacgcaccaccacgcccgtctaattttgtatttttaggagagacagatttctccatgttggtcaggctggtctcgaactcccgacctcatgtgatccacccgcctcggcctcccaaagtgctgggattacaggcataagccactgcacccggcctccgcctgtttctaagtatctcgctcaactctcaccaagatcttctaagattctgtacctatgtgatgatacctgagccttttttgtttttcctgattctctatgcaggtctgttcagcgcgccctttctctctcgttttctctgtcccctcctctctctgggtctctgtccccctctcaggaggtctttgtttgtctcacccttcaggcccagccccgtcctttggttgttccatctccactggggccctcttacgtatcttctagcaacttcgcctccgagatccttcgggggcccgggaaggttggggaggggccgaggccgagagaggcggggcttggccgggtcagaaatggggcgtggctcgcggagttatccgggatcccaaaagaaagagctcaggcggggacctggatctagttccccaagatcacttacttaaggcctccagcaccctgtagcccctcctccctcagacccaggagtccagatccccagctcctcctcgctcagacccaggagtccagatccccagctcttcctccctcagacccaggagtccagatccccagctcctccctaagacccaagagtctagatccccagccccctcctccctcagacccggaagtctagggccccagcccctcctccctcagacccgggagtccagatccccagctcttcctccctcagacccgggagttcagatccccagttcctcctccctaagacctaggagtccagatccccagccccctcctccctcagacccggaagtctagggtcctagccactcctccttcagacccgggagtccaggctccagcccctccttcttcagaccccgtactctggttccccagcccccttcctctctcagattcagtagtcccgggacccctgcccccttctctctctctctctgtctttctctctctttattcctgccatatcctcaagacagattctttaggactcaagggacgttttaggtagggaaatgtggacactccctagggcagagggcgtggtagatggtctggaggtcttagccattctaggcgctgggttctactaggtgccgtgtctctaacttgctttgttactttaggtgcttctactctctatgccctagtttctccatctgagaaatggggctaatattactgtccaggttcttgtgatattacttgtgtattagtagacacagaatctggaccacaattaggctgaacacatgagatttacttattgttattgctggtggttgtgacagtgttttgctgagaagcaatcgtcattattacatgcattcatttaagaaatattcaatgcctgctatgatttgggctccaggctgcacacgggacagaatagacatggcccctactctcaggaaacttgcatgcttgtaagggagacagacgagacatacatagcatatattctgtaagaatatgtacctgaagatgtcaaatcagggcaagaggatatagagtcaccgaggtagggagatagagcagataacgtggttaggggcctggcccggtggctcacgcctgtaatcccagcattttgggaggccgaggtggacggatcacttgaggtcaagagtttgagaccagcctggccaagatggtgaaaccccatctgtactaaaaatacaaaaattagctgggcgtggtggcaggcacctgtaatcccagctattcgagaggctgaggcaggagaatcgcttgaacctgggaggcagaggttgcagtgagctgagatcgtgccgctgcactccagcctgggcaacagagtgagaccctgtctcaaaaataaataaaataaataaataaataaataaaaatacaaaaattagccaggcatggtggggcatgcctgtagtcccagctacttgggaggctgaggcaggagaatcacttgagcccaggaggcggaggctgcagtgagctgagatggcaccattgcactctagtctgggctacagagtgaaacttcatctcaaaaaaaaaaaaaaaaaaaaagaataaaaaattaagtagataagatggttagaaaaggctgttatgggaaggtactggaagactggaagttgaatattcctggggagggaacagcttctgaaagtaaaacaaatgtagtgattcagggactggaaaataatcagctaagaggagtggcataggtatttatatttttaaataaatgctttatgttgcaatactttttgcgtgtgttttttttgagacagggtccccctctgtcacccaggctggagtgcagtggtgtgatcatggctcactgcagcctcaacctcctgggcccaaaccatcctcctacctcagcctcccaagtagctgggaccacaggcacacactaccacacggggtgccttattttgtagagacagggtctcagaatgttgtccaggctggtctcaaactcctgggttcaagagatcctcctgttttggcctcccaaagtaccaagagattacagtcatgagccaccatgcttggcctggaatacttttatacttagagaaaagttacaaagataatacagagagttctcatttactccagacaggagttcccctaatgttgccatcttacattgtcatgtaatgtacatggtacattagtcacaactaagaaactgacaggactattaggtaaactgcaggctttatttggattttaccagtttttacactaatgtcctttgtttctggtcctggatccaatctggactaccacattggatttagtcatcctctctcgttagtcttctctaatctgcagcactctctaagtctttccttgtttttcacaaccttgagagttgggggagttctaaattattttgtaaaatgaaggtcttttttttttttttgagacagggtctccctctgtcacctaggctggagtgcagtggtgctatctcagtgcactgcaacctccacctcccgggttcaagcgattctcctgcctcagccccctgagtagctgggattacaggcgcctgccaccacgccccgctaatttttgtatttttagtaaagatggggctttactatgttggcaagactggagatctattttaatgaataatatgaactaatttaatccacattttaaaaaattatgtatttattttaatagagaagaggtctctctatgttggccagttggtgttaaactcctggcctcaagcaatcttcccacctcggccttccaaagtgctaggattacagggtattttaaaatttttatttatttatttatttatttatttatttatttatttatttaagacagtcttgttctgtcgcccaggctggagtgcaatggcacgatctccgcccactgcaacctccgcctcctgggttcgagcgattctcctggctcagcctcccaagtagctgggattacaggcatgtgccaccatgtccatgtccagctaatttttgtatttttagtagagatggggtttccccatgttggccaggctggtctcgaactcctggccccacgtaatcctcctaccttgagtgctgggattactgggataggcccccgtgcctggcccacaacattgcattttaaggaggagaagtcccaggcaacaggatcgccctatgctggacgatgttagtggcactgagtggccggaataagatttttgccaagagatctggcttgcttttctttcctggagactgatgagaacccagatcttcagatttcaagtctgggtctatccattcggttactttaaatcccagaggcagatggcgctcactgctcaagtctagcgtcatgggattgttctagcttgttcttttattgcttctcctattactaagatcaggatctgacgccatttggaaaccagggtctgaccgcttaccacgtacctcgccctttaaggctttttctgtcccgtcccccgtgcccctgcggcgctaggagactggaggcgggaccttgtgtcgctaaggaaatgccctttactcagcttccaaaattgacaggctagttctgaaaactggccaaccaacttctgcttaaggggaagcgagacttccgatttgtaggggaacgcagcggcgattggttagagtcccgcccacttgttaagcgtcgcgagccactattctcggctctgattggccagagaactcgcgccgcttttgaatccccaccctgcggaccccgcgcgcctcgccttctccctctggttggcgagcgcctttctgcgccttcaggcatttttgctgaggcttttgtctgcgcatgtgcgggtaggttccggtagcatccgggagacccggcccaggcctggagatgctgagcggagcttggagggagagaggggactgggttgttgaggggagaatccctctcggcatctccttggcccactggggagccccattgccccatccaccgcttagaaccagacccttcctttcactctccactccctatccctaccggctttagaccttcaaagttccaagattcgaccttcggggtctccccatttcgtaggggcttacagatttcctaaaatccccctcctccccgaacccccttccgtccctggagattctggggtccctgctctttcccattcattccaccccatctacttgggacccttccaagggcaaggggggcctctcagtgcctctcctaccctcatgtcctttctcctcttttaggtccaggaggtcatctttgcctcccttccttgaaatctccccagatttagaggccctcacccagcttctcccctctcagccctgtcgaggtgtcaaggttcggggatcacctttgttgttgttattgtcgaggcgtcaaggttcgggtgtcacctttgttgttgtgtgtttttttttttttgaaactgagtctcgctctgtcgcccaggctggagtgcagtgatgcgatctcggctcactgcaacctccgcctcccgagttcaagcgagcctcctgcctcagcctcccgagtagctgggattacaggtgcctgccaccaggactggctaattattgtattttcagtagagacggggtttcaccacgttggccaggctggtctcaaactcctgacctcaagtgatccacccgccttggcctcccaaattgctgggattacaggcgtgaaccacagcgcccggcctaagccctagctgttcattgccacaatgagaggaagtacaggaaggtgttgagatcatgggcgtggagtccaactgacatgcttgactgatgtcacatactgctctgcccctgaaaagctgagtcaccttgggtaatttgcttagcctctctgagcttcagtttcactcgggagctggccaagaacacttgtctcagagttgctatgacattcgaacatggcagtgtacgtaaagggctcggcatggagcttgttctcattaagccccatggcacgtgggcatctatgctttttttttttttttttttgtagaaaaaagtttatttgctggttattgtttgatccttgaaatacaattcctcactggtgatactagtataaaatggtggttatgaatccatgctagcccaacgaaaactaatttaacaaattggtaaaaaaaaaaaaagaagtcgtttttgaatctctattaagatttgaactaatacataagcaaatctgtgctaaaactggaactgctgggccaggcgcggtggctcacgcctgtaatcccagcactttggaaggccaaggtgggtggatcacgaggtcaggagttcgagaccagcctcaccaacatggtgaaaccccgtctctactaaaaatcagctactggggaggctgaggcaggataatcacttgaacccaagaggcggaggttgcagtgagctgagatcgcgccattgcactccagccagggggacagagcaagactccatctcaaaacaaaacaaaacaaaaaactggaactgccttctcacactacatataatttgccttccagcttcaaccatctgatgttgaaatctaaagcactctcatgagttaaatgtccctgacaaaccatgtagatggacaaaccagattggtggtctttaactgctggtgatagaaaaaggctgcagtttagtacttaaacctgcagttagtggtcaactttccatctaggtagagtaactaaggagagctgtgaaatatcaaaagaaaactagaggccaggacaaagaggcaatgtcagtcaagccactgcaagctggtatgcacccttgtatttcagccaaaggcaggcaatccaaaattacagattgctttccttaacttgaccaaacagtgcattttacctctgaaagtcttgtcaagggttgcatttcattgtacctagtaaaacacaaagtccactctcataaaaatattatattttccagaagaaatattatatgtaatacactgaaaatcactgattgcttttgcttctttttttccgtgaatgtgtaggtgtttgagtctcttgtgtttcttattttacataggatatgggctgtttgaaaactatttcattagcttcatcatcgtcattcatttcagccatttcagattttcgtctctccaaaaatgttggtgtacaaactggtgtgaggccctggatatccacagtcttctcaggagtgtcaagagtgcctaaaacctttttcttcttcttatgtaaaagatggccttttgtagacgtctgacaattagtttttgaaatactttctgttttctggaaaatcaaagaaggaagaaggaaaatcataatcaattcctttttttttttttttttttttgagattgagtcttgatctatcgcctaggctggagtgcagtggcccaatctcggcttactgcaacctctacctcccaggttcaaacagttatcctgcctcagtcttccaagtagctgggattacaggtgcctgccaccatggctggctaatttatgtatttttagtagagatggggtttcaccatgttggccaggctggtctcgaactcctgactgttggggtgatcagacccaacactagactgtgggggctatgaagtccggcggagtcaaaggaatgagaaaagacaagagtgcataagatgggtccaggggaccaatgctagtatggaggctgcgaaggccgcaagctctggaagcccgcactgtttattggtgatcaaacaaagaagcaggtagtgaggatgtgggggttgaaagaaagtggtgcatcaagcgcatgatttacagctgtgacagtttagcattttctttgacgcatatggaacatgttctgctacttgagataatgggaaacatgttcttctagtttaagatacacttgatctatgagcctgggaatgctagaagcaaggagccggcaagtctagacacattccagaggccacgaggggtttcatgctctgagccctggattccatccaagccatgaggggttttatgccctgggcttagattacggtgccgcagggcagccttccaccctttagcacagagcttggtgttccaaagaccacaagggcttttagaccctggaccccggcatgttccaagactctttatattatgtcagactagcaagccctgcctcagcttttttctcactacttagcttttctccaacatgacccccttttcttttttgtaaaaccaccacagctatcattgcttgttctcgatggtggctttctctccagaggtggcttccgcatctgcagactaaaaggagacagcacaagcacataattattagaacaggatttccaagtgtagagttttcaatggccttaatccgtttaagaggattgattgcagacaacccattggctgtcttgttcaaattatcagttccagggagcagggctaagtgagtctgagaggcttcaaaatcctgctcttttagttttacaatttagagggtgagattttcctctctaccctctagatggcgtttaaccttcttccatcagtgttctgtctcattgtaactgaggagtaacacaaaagtcagatgtattccagtcacattgcatttgaattctactttctaaattcataatacgatctcccatccaaatctctgtctgacggagatcattaatttggttaactattttttttttatctatttgagcttgggagttccataattttgtggaattcttttgccacttattgacaaattcagcagttttcacagatgaatgtacagccacaccggctattgcagcggtagtagtaacagcaatgaggccaattatagcaaagaaaagagcaactataaatctttgggataagagttttttaaggatttagttacaatacgaatggatgatgatgcctcccatggtctatttagagacacatagggatccaaactccttctctggctttaattatcaggatagtctgatttttattaaaagttggtaacatttcctgttgctagcataaaagatggccgaacacagctttgaatccaaaaggtcctgttggaaagaaaagagagagcatatttatttttacctccctcccctctataccttttatatgtaccctcccaacttttgattgaactttcagccatagctaatttccataattcagaatgttcctgtcttatggcaggagatatcatttttggactaggggcaacaatgccagcaggactctatatgataggggcattagcttccgtccgaacatactgtgtatgattcctttgccagcgattcctctggtttactacatttgttctacaagaaggccttccggtgcaattttccttaaagatccccttaggggactaatcaatggtgattccataggaattattttgtagcacctcagccttacttgctatacaatcttcccaagttcaagcatccacaccttcaaaccaaactttgcttcgctcacattcacgcttattaggatggaacttcagggttttaggattggaataattatattttaaactactcccccaaatcatatgcaaagcagcctgtgatttattttttccggggactactgccaaccaagcttgtgtgtcaatctgtaagcatccaacaacaggtcccaggcatatgggggatatttatatcctatagatatattcattttatcatcccttcctcattaggatgcattggcccttattcagaatggagtcgttctggtttgaatgcttcttacatatttccactttcccttttacaagaggatccttaatcctaaggcttgcagaaggatgaaggtccgtcttctgcaacttcttcatgctgaataggggtgatgatattcctgcctaactattagggtctcttgtattcaggtagagaggagctcagtcagaaagcattggtccgttaagcatctattgtacctctgaatcccagcaaaaggtacaaccttggtgttccagcagtttttcagcttcctgtgtggtttttcttgatctgtccccatgttatgggggtggatgtcagcatgactccggtcggtcctcgttccgtcttcgcattcagactcaactggctcatggcttgtactgggggaaccaggtccacggttgggatccatggatctctccagtctcccattccatggtcgtacacatcttgagggcatccgcacggtttgttcatctcctgcaaaaacacaagcataccctcaaagccatgttagtaaatctagcgaaacagaagcaaaaacttttgtggctgtagccgggaggcatgccattgctgaagcatttgttctacaagctgtaactcagcttctgcctctgtggttaattaccatggggtaaaactttccactgataatgagaaacaggccccttctaacagaaggcacagaaaaagcaaatcgaggcttatccttcttgtgcaacagtatagcagaaaagcaatccttaagccttcaatttgcactgtacaggtgggtccactagatgctgtaactgatgatacatcttcggatgtttggtgggcaccacacaggcacctgactgtcacctggagagacacaagcaaatcctcttccccatataattatctttcctttttctcagctctttgtatgtgcttccctccaccatatatcttgtccagactttttattttccttttctacattccttttttgtgtgtccaaattgcccacaattaaagcaagagcctgagaaacggggcacattccttcctactttcaatccagccatagcctgagctaaaagaggagccctatgcaaggtatctccaatgccatcgcaagccccagtatattcagccaaatgagccttccctctcataggtctgatggcagtttgacactctgcatcagcattttcatatgcaggaagctgtattacaacatcctgagctgttttatcagttatggctttatacacagcctcttggagccaagcaataaaatcaatatatggttctttaggtccctgtcggacgagctgaaagaaggatatttttccgctgtaacatttatcctttcccatgcccgtaagcatgcagggcacagctgaacaatggcaacatcctccattactgcttgattttctaatctaccccagttggggccaactcccatgaactgttcaaaggaaacaggcacaggtggctgcgcttgtgtgttttcccttgcctgagtttgagcttcatcagcccaccaagttttaaactgtaaatactgagacggagtgagaacagattttggtaaagtatcccaattatacggtattaacctagtatcaagagccacattttttaacaaagtttgcacaaaaggaaagttcggtccatattgagtaatggcttacttaaattcctttaataacttaaaaggaaaagtggcccaattagttatattctgtcctccttgctggattatagtaactggaaattgccatgcttcaaggtcttcctcagttctagctttttttttttttttttttaacagagtctcgctctgttgctcaggctacagtccagtggtgcgatctcggctcattgcaacctctgcctcccgggttcaagcgattctcctgcctcagcctcccgaatagctgggactacaggcgcacaccaccacgcccggctaatttttgtgtgtctttagtagagatggggtttcaccgtgttagccaggatggtcttgatctcctgacctcgtgatccgcccacctcggcctcccaaagtgctgggattacaggcgtgagccactgcgcccggcttgctctagctttttgaatagaattttgcatagcaccaccaattgctccaggttttaatgttgcaactacaggagcagaaaattttatagctaattcactttctcgcccattaaggggaaagggaggaggtggccattcacttaattcagcaggtagagccgatgggctagtaaaatatacttttttcggtttccccttttttaacctcttctcttttttgctccttgcattcagaatctgaagttagttttttacactcgtcctcctcttcctcatctgaatctccctcatcatctgtttgaaagggctcaagggctgcctttattagtgcccacattgaccaaacggaaactggaatttttgctccctctttatacgcctttttaaaatctctgccagttctctcccattcatccaactccatagtcccttgttctggaaaccatgggcaaaactgctttactgtactaaagagtgataacaaattttgagtactaactttcactgcccctttttgtaataaatgccttaagaaattcagataagcagaatgttcgctttcactttgtctgattgttaccctggttcttctgagcactcagctttcccaccgagcttctttcagtcatcctcgggtgtcctctgatgatacttcctccactttcatgtcctctagcgttccttcaccgggatcttcattgtcccatgttgggcgccaggaatgctggggtgatcagacccagcaccaggccatgggggctacaaagtctggcagagtcaaaggaatgagaaaagacaagttaaaagtgcataaggtgggtccaggggtccaacactagtatggaggctgcgaaggccccgagctctggaagcccgtactgtttattggtgatcaaacaaagaggcaggtggtgaggatgtgggggttgaaagaaagcactgcatcaagtgcatgatttacagctgtgacagtttagcattttctttgaagcatatggaacattttctgctacttgagataatgggaaacatgttcttctagtttaagatacaattgatctatgagcctgggaatgctagaaacaaggagccggcaagtctagacacattccagaggccatgaggggttccatgctctgagccctggattccatccaagccacgaggggttttatgccctgggcttagattatggtgccacagggcagccttccaccctttagcacagagcttggtgttccaaaggccatgagaggttttagaccctggaccccagacatgttccaagactcttttacattatgtcagacatgcaagccctgcctcagcttttttcccaacactcagcttttccccaatacctgacctcaggtgatccacccaccttggcctcccaaagtgctgggattacgggcgtgagccaccgtgcccagccagctaatttcttcctgagtaatctttatttctttttaaatcactcctcatctgtagcttttgtgttagtgtccgattctgattataccatttcgctgatggatttgatggctgcttaaatggaatattccagtgtttaaagagttctttatgtacttttccaggtggcataaaatgacactccaagagtctttcaccaaacaggtagttgttcattgtttcagcaactatcttggcaacatcctcagactcaaactccacaaatgcatagcctttgccatttccagtcattttacttctggacagtctgaactgtgtcacagtgccaaactgggagaaatatgaaaagatctgggtttcgttaagtagggttgttcttgttttttttgctgggttatgtgcttgcaaacctgcgccacctccttttgaaactggacatcttcctgcgggttaagcagtgagatctcagccaggccagaaaaagctgccatgccaaaagcggccgacactaactccacgcggtgctcctggaaacgtcgggctcccagctcccatgaggcagaaaacgggcatctattcttttaacatacgtatgtatacacagtccaagtgatggaacatcaggatcagtggcagctgggagggtgggggaggcagcaccacctgatatttaggagggagaatgaccgggagttgccgatacgtggagtgagggataagtcagagttgttcctaagattttgagtttgggcaatggtggcatggtaagctaagatcaaggatatgaagggaagaagggctttcaggctgggagcatttaggagagcatgagaggataatgcatgtgttttggacatgaggtacttgcagggtgtccacatacagatgtctgggaaacaatagatgcaggctgggtgtggtggctcacgcctgtcatcctagtcgcctggatagctgaggcaggaggcctgcttgaggccaggaatttgagatcagcatcggcaacaaagcaagaccccatatctaccaaaaaaatttaaggtcgggcatggtggctcatgcctgtagtcccagcactttgggaggctgaggtggatggatcacgaggtcaggagttcgagaccatgctggccaacatggtgaaaccctgtctctactaagaaaaaatacaaaaattagtcaggggtggtggtgcatgcctgtaatcccagctacccaggaggctgaggcaggagaatctcttgaacctgggaggcggaggttgcagtgagctgagatcgtgccagtgcactccagcctgggaaacagagggagattccatctcaaaaaaaaaaaaaaaaaagtcaagaagaaataaacgtggtgctctctggagctggaggctgttgatgtaggtgtgggaattaccacttgggagagttcatctctgcctgtttcaaaatccatcgtgagcattgccagtgctttcttgaagagctctcatgagcgtggggcaggattggtgccatcttcatatcacaggctgtcttagttcatttgtgtggctatagcagaataccacaaactgggtaatatttaaataataaaaaagtacttctcatggctctggaggctgcgaagtccaagatcaaggcaccagcaggttcagtatctggtgagggcctgatctctgcttccaagatgtgcctctcttatggaaggtggaagggcaaaaaggggccaacactgcgtgaagcctcttttatagtctaaatcccattcatgaaagaggatccctcatgacataattacctcctaaaggccctgtctcttcatattattgcattggggattaagtttcaacatgaattttggagggacacaaactttcaatccatggcagaaactctttgcagagccattttgctgcaaaaacttgagggtgggggtatgacttatttaataaagatgacattttctgtataaatgatacctaagtcctcctcattagcaaatgtcgaataggacattttctttttttattattattatactttaagttctagggtacatgtgcacaacgtgcaggtttgttacatatgtatacatgtgccatgttggtttgctgcatccattaactcatcatttacgttaggtatttctcctaatgctatccctcccccatcccccaaccccaccacaggccccggtgtgtgatgttccccgccctgtgtccaagtgttctcattgttcaattcccacctatgagtgagaacatgtggtgtttggttttctgtccttgcgacagtttgctcagaatgatggtttccaggaataggacattttctttctttttctctttctttctttcttctttttctttttctttttttttttttttttttttttttttgagatgcagtctcactctgttgcccaggctggagtgcagtggtgcaatcttggctcactgcaacacccacctcctaggttcaagtgattctcctgcctcagcctcccaagtagctgggattataggcacccgccacaacatctggctaatttttgtatttttagtagagacagggttttgccatgttagccaggctggtctcgaactcctgacctcaagcgatccacccgccttggcctcccaaagtcttgggattacagccgtgagccactgtgccccgccccgaataggactttttctgttgcctcttaaatggtttaaagagggcagccaataatggggtcagaaagcttctctctgcctagcttcccaaaaaaacaaagctgccagctggctgttggacaggtgagaagtctttggtgagatgcttcatcatcctctctttcctgaactcttcacgtgtaccagggctctggataggagggggtgctccaagaaaatgtttaggaaagactagggtttcctgatagaatgggaggaatcaacacactatctccccattgggtgtctgtgtgggcagccaacttcttgctgtgccctgcatctccctgcgcaggggagaggagcattagagaggaaaagctgggggcaacgaggagcttggggcagtgtagcctgcactccacagtccagcatggttaggatgtgtgggtttctgagtcctttctggctactataacaacaataccataggctggatgggttgtaaacaatgaaaatttatttcttatagttttagaggctgggaagtccaagatcaagatgtcagcagattcagtgtctgatgtggactcacttccaggcttacagatggtgccttctggttgtgtcctcacttggtaggagggacagctctctggggtctcttattaagggcactaatcccatttatgagggcaccaccctcatgacctaatcaccttccaaaggtcttgacttcaaatatcattacattgggggttaggaattcaacctagactttggaaggacacatacattttgtctatagcagggggtggatggacacgaaggagggtagctgggcttctgcaatctaggtgatatgtcacccaagaaagcggtaagaggctgcatggtgtctgccaatggtggaattggagaaggtatgggagaagcaggggacacaactctcatatcaagaaacagaggaggctgggcacggtgactcacatctgttatcccagcactttgggagactgaggcaagcaaagcagttggggtcaggagttggagaccagcctggtgaacatagcgaaaccccatctctagtagtaaaaatacaaaaattagctgggtgtggtggcgcgcacacgtgtagtcccagctactcggaaggctgaggcataagaatcgcttgaacccgggaggcagagtttgcagggagccaagatcgcaccattgcactccagcctgggcagcagaacaagactcttgtctcaaaaacgaaaaccaaacaagcaaacaaacaaaaaaacatgattgactcagtgatcagaaaacatataactattttatattcatacttcctgcagttaatgtcccagttgactggttaaaaagaatatttgggggccaggcgcagtggctcatgcctgtaatcccagcactttgggaggccgaggcgggcggataacaaggtcaggagatcaagaccatcctggctaacacagtgagaccccgtctctactaaaaatacaaaaaattagctgggcgcggtggcaggcacctgtaatcccagctactcgggaggctgaggcaggagaatggcatgaacccgggaggcggagcttgcagtgagccaagattgcaccactgcactccagcctgggcgacagcgagactgtctcaaaaaaaaaaaaaaaaaaagaaaaagaatatttggcaatacggaaagttccccttgggttttctgactccaagcctggtgtttttgtttgtttgtttgtttgttttcatttgcacaacattgcctttccccaagagtactggataacaatgccctccctccaagtcccaagtcactattgcagaagtcaggaccttaacacacacatttcaaagttactgacacctagtcaaacctggtgccttagcaatgcaatcttgtaatttcccaggtcaaacagatcttcaagggttgctctcatggcagaatttggtggtagaaggaaggaagcagagtctcagtctttgtgcagcttgtagggagttccctttttctcaagcccttgcagcatccttcccactctaagcttaaaggagactgtgtaaccagcagtgctcacccatcctgggcctgagtttgaatcccagctctggagttcagctgtgtgacatgcaagaccttgtccctctctgaagtccttctgtaaaatgaggtggctgcattgggtgatcccattccacaccatgagtctatagtcctatcatcctgggtataccgacgtctggtggccaactttggtccttgcagctaattcaggttttttctttgtttttgagacatagtctcgctgtgtcacccaggctagagtgcagtgacgcgatctcagctcactgcagcctctgcctcccaggttcaagcgattctcatgcctcaggatcctgaatagctgaggaatacaggcacctgccaccacacctggctaatttttgtatttttagtagagacaggctctcgctctgttgctcagactggtctcgaactcctgagctcaagtgatccgcctgcctcggcctcacaaagtgctggattacaggcgtgagccaccgtgtccagctcagtttttaattttttatttttcagtatctggagtgtttagcacagccaggaaacaaaacacaccagagagggccaccttgccatgtcaccaacgatgcaataactaccgaagaaaggccccttgggtggctatggaggagcagaggtcagcagaggagatggccagcaaagtgctctcctttgctctatttcttttcttttgagacggagtcccactctattgcccaggctggaatgcagtggcatgatctcggcttctgcaacctccatctcccaggttcaagcaattctcctgcctcagcctcccgaggagctgggattacaggtgcccgccaccacacctggctaatttttgtatttttttaggtgagacggggtttcaccatgttggccaggctggtcttgaactcctgacatcaggtgatccgcccacctcagcctcccaaagtgttgggattacaggcgtgagccactgtgtgattcttagcatgttgtaagtttgtcattgttccatttccaaagcattccaacctccatccccgcatgcgtttgcacttctttagatttgtgggtctgagagcgcattagcaccccatccacatgcagtctcctgcccttccaatcctcaccctgaaaaccttcctgtagtcacagacctagtcatttttcccacggctactcttgaactctttatggacctctgcgctcgcttcctcttctgtgaaaacaaatgagtttatgtagattaagatctagccaacttctgtaaaggatcagatggtaaatattttaggctttgcaggctagtgactcaactctgcatgaaaataactgcaatgtgtaaaggaatgagcatggttgggcaccacactgaaatttgaatttcatctccttcccaggggccccagaagagtcttcttcttcggactttttccccaagcatttaaatgtaaaaacatttctagcttgcaggtggtatgaaaataggcagcaggctggaggtgactgaggagcctatctagtcttttttttttttttaaacagagtctcgctctgttgcacaggctggagtgcagtggcgccatctcagctcactgcaacctcggcctcctgggttcaagcaaatctgcctcagcctcccgagtagctgggactacagttgcgcaccaccacgcccagctaatttttgtatttttagtagagacggggttttaccatgttggccaggctggtctcaaactcctggcctcaagcgatccatcagcctcagcctcccaaagtgctgggattacaggcgtgagccactgcgcctggctgtatctagtcatctttaaagaccctcccatctctgagaacccatgaaactgcgcagtcctctggactggagctggggtgtgtcaaaggcaaatctttgcctgccttctcagaacaccatattcagagaaggccattcaggacagatttgtcaggctgttccgaatgcccaggtctgggatgagatggcctatccatggaggatttttattttttcgagacagggtctcactctgttgctcaggctggagtgcagtggtgtgatcttggctcaccacagcctctgcttcctgggttcaagtgatcctcctgcgtctgcctcccaagtagctgtgttacaagaaaggggtcctgatctagaccccccaagagagggttcttggatctcacacaagaaataattcaagacgaggcggtaaggtgaaagcaagtttattaagaaagtaaaggaacaaaagaatggctactccatagacaagagcagcgcctagagctgctggttgcccacttttatggttatttcttgcttatttgctaaacaaggggtggattattcattcctcccccttttgggacatatcgggtaacttcctgatgttgccatggcatttgtaaactgtcatggtgctgtcaggagtgtagcagtgaggacgaccagaggtcactctcgtggccaacttggttttggtgggatttggttggcttctttactgcaatctgttttatcagcaaagtctttatgacctgtatcttgtacggacctcctgtctcatcctgtgacttagaatgcctccactgtctgagaatgcagcccagtaggtctcagcctcattttattcagctcctattccagatggagttgctctggtttaaatgtctgacagctgggactacaggcacacaccaccaagcccagctatgttttgtattttttgtagagatggggtttcaccatgttgcccaggctggtctcgaactcctgggctcaagcaatccacccaccttagcctcccaaagtgctgggattacagacacccaacccatttggaggattttttttttgagatggagtctcgctttgttgcccaggctggcgtgcaatggtgtgatcttggctcactgcaacctccgtctcccaggttcaagtgattctcctgcctcagcttcccaagtaggtaggattacaggcgcctgccaccatgcccagctaatttttgtatttttagtagagacggggtttcaccaagttggccaggctggtctcgaactcccgacctcaggcgatctgcccacctcaacctcccaaagtgctgggattacaggcgtgagccactgtgccctggccagatgtttttttaaaagagagagaaagagagagagagagagaaagagagagagagagggagagaaggaaactttgcactctgttatcttcaacctcttactctaccttcctccctagccgaagtcccagtcctaaagcctaagagaccctcattggaacttgacttctgcataatccgcctgggtgcccttgggcatccgggcctcaggcctgggtctgacgcctgggaagttgagcgtggcataatggagctcctcttggctctcctgggattctggggcttgagtggatgatttgggttctgggaaactgggcaactgatactgctttttctggttcttctttgattctggggagggagcacctggtggaagaggggtccgaggactgtttggtgtggctttctgattccgcttctgagcctgagggaagaaccaccatccttcattcattcattcagcaaatatttgagcacttaccacgcgtcgggcactgatttacagcacagagtgaaactaagtccctgcccttgccttgctgagcttgcattccatcttggaaggaggaacagacaataattagcaaaagtacaatgactggtaagtgacaaatgccatcaagaaatttgagcacctttagaaggcagcgaaagggagggtgggatgactgtttaataggtcatccagggaatttcaagaccggcctggccaacatagcgaaaccctgtctctaccacaaatacaaaaattagccgggcgtggtgacacatgcctgtggtcccagctactcaggaggctgaggcaggaaaatcacttgaacctgagaggtggaggttgtagtgcgctgagactgcgccactgcactccagcccggacaacagagacaaaatctgtttcaaaaaaataattgatagccgggtacggtggttcacacctgtaatcccagcactttgggaggctgaggcgggtggatcacctgaggtcaggagtttgagaccagcctgatcaacatggtgaaaccccgtctctactaaaaatacaaaaattaggggggcatggtggtggatgcctgtaatcccagctactcaggaggctgaggcagatgaatcgcttgaaccaggaggtggaggttgcagtgagccgagaccttgccactgcactccagcctagacaacaacagtgaaatcccatctcaaaaaataaaataaaataaaaataaataaaataaagaatagcatgcatgcacggagagaaagactggagggggtgagaacggaagcagagaaggcatgcagaaggggccagtggtgcccggggtggggtggggggtgttgatgcatggcttgtagtagtgagggaagagtagggagaactggcttggttgtattttgaagggaatttgctgatggattggttgtggggtgacagagaagagaggagtgaaatatgattctaaagctttagacttggctgggaaaatgtggtgttatttgctaagatggggatagagatggagcataaatggtggaattagtctttttttttttttagatgaagtttcgctcttgttgcccaggctggagtgcagtggcatgatctcactgcaacctccacctcctgggttcaagtaattctcctgcctcagcctcccgagtagctgtgattacaggcacccatcaccatgcccaggtaattttttgtatgtttagtagagatggggtttcaccatgttgaacacgctgctcttaaaattttgacctcaggcgatccacccacctcggcctcccaaagtgctgggattacaggtgtgagccagcaggcgtggcctttttttttttgagacagggtctcactctgtcacccaggctggagtgcatggtgtcatcatggctcactgtagcctccaactcccaggctcaagagatcctcccacctcagcctcccaagtagctgggacaatgggcatgcaccaccacacccggctaattttttattttttttgtagagaagaggtctcactatgttgctcaggctggggaattatcttaagttggttttggacaggctaagtttgaagtgctgattagacacccacatggagatgttgcatagacagtcttcagggaaggagccacgagatacaattttgcagtcatcagcataagatgttatctcttaataatttccagaatttacagagtattacccaggggccaggtgatattctgaatattttattatgcaagtacaatatatttaacacccagcatcatcctaggaggtggccgctagtattgtctccatgttacagctaaagaaattgaggcacagagaagttaagacacttgtttcatgacacagtgatgacagcaggatttgaacccatgcaggctgatttcagaccccctgtgctgaatccctaggatgcccagcctcccgatgatacacataattgttaagcagttaagtgtagtcatgtcaatggtggcagtaataatggaacaatggctacagattgagaaagtgcatgtattctaatcctcaaaccaactctcaaaggagacagaggaagaaatgaaggctcagagggggtgagtgacgtggctgaggtctcatagctagtaagtgccaggcaggatttgaattcagaactatcggtgcttttcccaccttgatgtcgctaagacaaggggtgcaaaagtcagaaagtgggatgtcagctttagagaagagaaaaagtggaagcatggcccagacactcaccagggggccagccgtcgggaccacattgatgtaatccaggatcgtgctgtgccgggagaacctgggcctcggggtttctgtctgagtccgtctcttcggtagaatcttcatgctgaggaaatgaacccacctgtttgtgccctgctgcacctccctgtgacagactgccacgtttactacctgagaccgtcactatgacagttactactgttaccacttgagaccgtcattatgagactgaaagaaggaggacaaacgtagaaatgaaaacttaagacaaaagaaattattttaaaggaaggggtcaggggaagaagaagagggttccctgctactagtgagccagggcagctgtctgagcctctacagccctttgtatttattgggtagaaagagcagagagcaggaggtaacaattggtcagctgtttaattgatcacaggttcatattattactaacaagcttcagctgtgcctaattacaagaaacacttcgcttggggcgtgactgccctcagcattccctctgggaagcagacgcagtttgtcagttggacaacattctgcatttatgagaacagtttgctgtttactcatgtaacctccagaggtatactgcgttgatcacgaccttcactctttcggcctgcaacacctcccctcttcctgggtccaggccccagaccccgccacgcctcctcttaacctacatgatcagggccaggcagaggaaaagaagagccgtgatgccgattcccagaaacgctccgttggagaatgccgttgagatgagtcccttcttatctgcacacggagagggcaaggtgagcatttcccatccacgcagggctcacgaagcccgctcatcactcggcattaaggcttccggttcccatggcggacattgtatctgcaacccctctgtttacttttaggaaaccctgccacaccccggcccaggtgttaggacttcccattgtgttttcctgtctacatacagatgccacgggtctgctgtgtccctccaagctcctgctccaaccacaggaccctactctttgccccagtcagcttctcctccaagaaccttggcatccaggcggccccctaacctggcagctgcaggatggatccactctgggccccatggacgttccaggcctcacagcggagcctgaggccggagctgagccctccatggaggctcagggagctgttggcccagggcccggctgagctgggggtgacctcgaaggagtcctggctgctgttcccctccagcagctcctccccaagccaccagcgcagagagggggccgggctggcctgggaggagcagctgcagtgcagaccctcagcctcccaggagcaggaggggcccagcagcttcggggagtctgaggggagggaggacaggactcagcagggtccccttcctgggacccaggtgtcccctttcccccactcacagtgcacggagaggctgagagagacgtgctgggagcccagtgggtgccgagcgtggcaggtgaactctccttcgtgctccacttgaacccgaggcagctccaggaccccggggtctgagggctgggaggggctcagaacctgtcccctctgggtccagctcagcctggctggggggctgctgtgtgtgacacagaccaggcacaggctttggccctccagtactgggagagacgtgccgttcccaaggttttccaggactagggaaggaagaggcagaatcgatgagcagctcagggctcagggaccctcctgcgtggggaccctccagactcctgggcccccaattcggcactgagaggccttggctcctctgtcccctttcctacctgtcctgtttgcttgggaaaccatcactctcaggttctctggaggatctgaaatggagacaggggaccggctctagacggaccaggggcttccctctgggtaaagggaaccatcctggacactgaggtgggggaagtgggtgggatagaagggcagggcagaatcacccactgagtcccagacacaaactgcatgagggtctacacaggtaagaaggtcggtctccgaggcctggggctccaggccccctcagctctgggaccctgagcccagcccctgtatccctctgccctcccaatggactccaggcccctgctgggcacactcacactgcacagagaggtccagggctcgctgctgggagccaagcctgttctccgctcggcaggtgtagcgccctgaatccccagccttcaccccgggcagctccagccccaggggtctagggccccagggatgggacgaggagaggactctgttctgcaggacccagctcagtgtggcagggggctggctgtcagcagcacagaggagccgcaggaactggcctttttgggcttccaggtatgggacatttccctggggctggggctccagggctggagtgggaggaaaaaaaaaaaagagagaaagggagggagaaagagagaaggggtacagggaggagcacatcccctcatcccctgaagccttttcatctaaagacaactggcccagccccagcccgacggccctcagtacctggcgtgttgtcacgtgaaatgctgataacaaggtctctgggggcatctgcaacaagattgtgagctggcttcagggagggacaatttattcctcacacctggaaaaaactccctcagggaaaagaaagtgggactatcccgggaagacaagtgacaaccagcgccagggctcacgtgtgtggaccagacgccattcccatccccctcccagggctgcggcggcatcctgggaccccacagcttcctctccctggatgctcctgagctgggagccgctcactgtcccactgggctcctccacctccccacccaccggggctgtctgcacaccccaccctcccaggccacactcacaggccacacggagtcggacggtcctctgtgcgctcacaccctttctggagaagtccacatggcaggtgaggtcggtgttgtggtcctggggtctgggcgtgaagctgagcactgagaagtgggaggtcgttggtttggttccttgggaggagagggcagcccccgtccaggagaaagaagggggtggacattcctcaaaggcccagttaaacacacagatgaccgtcaccggctgcccgggctccagggtctcggggatgtagacatcaggcttctgagtcagggctgggacagagaccgtggtgggagattcttgtgctgcaggggtccctgagagccctctctgctcagcccataggctgtccccagggtccctccccagtgtgagaggcaggggttcccaccccattccatacctgttacttttagaaagaacccatcgttcatgaaattatatctcacatagcttcctctctccacccgaaagaagtactgtgactcatcctgcatctgcgcgtctctgatcaccaaggagcagttccccttggcgggatccccagtgagctggaatcggccccgggtgctcatttccacctctcgactctggtggtttgtggccacaggagcacccttggttgtctcagtcactgctttgaaccagtagccataagctggggtagaccctgtccagtcctgtcgggggtaggagaaagagcagggcacagagatgcacaggccctccggcaccatcactgactcctgcactcgtatccagaatctcccatccatagcctgggaccctgtggggagacagaggctcaacctgcaaccccagccctagctccgccccaggtcctttccggcccttggcccactcaccgcccagcagcgaggacagcagcagtggcagtagcatctccgcataggaggcgcagggcctgcctgagacaggcctgttctctggtcgtgctgtgagtggctcagggctcttggcagaaggggaagccgaaggcggaagctgagccctggggcctgatgcatgaaatgagcttcagacgctgagctcacagaactcctttgccttcccccacactctccggcccaccttgcccagttgtcctctgggtctcctgggggcccagcctggccttgggcttgttgagctggtccttccagagctccctgtgtaggaggagagggcaggcttgtgtctatcctgggggcctggctgggggtggggtagtggggtgggggctctccctctgggccctgggtcatcggaaaagcagaagtgagaagtccacagtgagctacccttatctgggccactggtggtggaggtggtgggtacaggggaagggaccgttactggagggggctggtcttgtcaggtaaaatgcaggatgcctggttaaagctttcacagacaatataaagtattttattttatgttttttggtataagtatgtccgaaatgctgcatgggatatacttataccagaaagcaaaataaatttatctgaaattcaaattaattaattaattaattatattttgagacagagtctcactctgtcacccaggctgcagtgcagtggtgcaatctctgcttactgcaacctccacctcccaggctgaagtgattctcctgcctcagcctcctgagtctgggcttacaggcacgcgccaccacgccaagctaatttttgtatttttagtagaggtggggtttcaccatgttggcagggctggttttgaactcctgacctcaaatgatccacctgccttgacctcccaaagtgctgagattacaggtgtgaaccaccgcacctggcctaaaattcaaatttaactgagcatgttgaatttctttttttctaaatctggccaccgtagggtggtgtcagctccacctcttcatgcttcctggtgagctcactgacccttggtccccagaagcagtctcctgccccaaccaggccctagtccacttcccagtctcccttcctcctctgtcattcaattgggacacccattgggattagaacacatatgtccaaagctaatgctgatgggaagagtttgaggaaggcgggagtgaggggcagagtggggggaacagactagggaaggggtaatttgcaatgaatggagtaaactctacaagatgttttcccctcactgagctcttcctgaaatgactctgtttgggtcacaccgaaacacagaactcatccttcaacctccacataccttgggtatcaagcactgagctttagggggacttggaggtgaatcctccatggtgagtcagctccagggccccaggttagcaaatgaagattcttagaaacaaagtacagaaggtcccctaaatgaactggatgctggacagacattcaggatgggacctggggaaggagtggtcagctcttcctggtggagggaagtcaggagaggcctcctggaggagatgacccagcctctgccctgtcctggttctttcatccatggcatttttgttttttgtttttgagacaaggtcttgctctgttgcccaggctggagtgcagtggtgtgatcatggctcagtgcagcctccatcttctgggctcaagcgatcctcccacctcagcctcccaactagccgggactataggcacacaccaccacgcccagataatttttgatttttttttttgataatttttgtagagacagaggtgtttgtttgtttgtttgtttttgttttttgagatggagtttccctcttgttgcccaggctggagtgcagtagcatgatcttggctcactgcaacctccacctccggggttcaagcgattctcctgcctcagcctcccaagtagctgggactacagacatgcgccaccatgcctggctgattttgtatttttagaaaagatggggtttcttcatgttgttcaggctggtctcgaactcctgacctcaggtgatccacccgcctcagcctcccaaagagctgggattacaggcgtgagccactgcaccttgctgagacagagtttcaccatgttggccaggctggtcttgaactcctgggctccagtgatcctcccgcctcggcctcccaaagtgctgggattacaggtgtgctccacggcctcatccactgtatcagtcgcttgagctgctgtaacagcgtgccccagacagaggggctgaaacaacaacattgacttcctcacagttctgggactagacgtccaaaaccaagatgtggttccttcagaggcttctgcctggcttgcagatgccacttctccctgtgttctcacacagctgttcccctgtgggtgtctgtttcctcaactcctgctcttataagaacttacaagaactcaagtcatattggactaggcccactctagtccaaatgagtgacctcatttcagccggccctcagtatgcacaggtcccacatcccggaattcaaccacctgcccatcacggcatttaaatacaaaaccaacaaaagccaacataaccataaaaaacagcatgaattaaaaatacagcataacaactatttacaccgcattacactgtattaggtgtgataagtaacctggagatgggaggatgtgcagaggtcccacgcaaacactactgtataaggcagctgagcattgtagattttggtatccaaggggtggggatcctggaaccaatccccaactaatacagtggaacaactgtatctctttaaagactgtctgcatgtacagccacattcttaggtactggaggttgggacttcaacacagaaatttggtggggggaggggggacacaattcagaccctaatatccacctctccccatttttttttttttttttttgagagagagtgttgctctgttgcccaggctggagtgcagtggcatgatcttggctcgctgcagccgctccctgtctgattcaagcgattctcttggtgcaggctcacgagtagctgggactacaggcgcctgccaccacgcctagctaattttcatatttttaattttatttttatctttttttttttttgagactgggttgtgctctgtcacccaggctagagtgcactggcatgatctcagctcactgcaacctctgcctctcgggttcaaacgattctgcgtcagcctcccgagtagctgggattacaggcgcctgccaccatgcccagcttatttttgtattttcagtagagacagggtttcaccgtgttggccaggctggtttcgaactcgtgatctcaggtgaccctctcacctcggcctctcaaagtgctgggattacaggcgtgagccaccaagcccagcttcaccttccctttgatccctgcttccctgtgacctaatctgggccttctctgaggacaccagcctccttcccgcaggggagctcttgtggtgggacacatcacaccttcctctccacagagctcagaaaagggcctctcccagggaggagtgaggggaggaaaggtgcctgggtcctggtggaggtgggtccctaaggagctgatgatctctagggcccccagcctgggcccagccccacctctgcctttgaacatttcacacccatgggatcagccgacaggagccaggagagcggcaccgtcttcctcctcccgcgggtttctccacatcgctgccccctcccattcccccctcttcacttttctgagttcctgtggtttctgtggcctcctcaccacgtccccttctccagcgaggccagagcccccgacgccccgacttgctcccagcccttcctacccaagccgccctcccagccttggtcagacaggactggagaggctgcctggggccccgggactggtttctgggcagcctcaagtctgttttctggcctgagaaggttcgggttttccctgagctgcttccctccaaaaccagctccctcaataccagcctcccacccccgcacccgcctctccttcattcagcaggggctaggcgcctgctcttcctccataattccacacggaggggtttaggaagccccacccaggctccagaccccggagctgcacgagggcacaagtgggcgctggaaggaagggcggggacggtgggaggtgggggagggagaggcgggggtgtctgacaggggtcggggcaggatctcgccccggggggcgcaggtgcggcgtgaggaccgcgtcctgaggagggaggggcgagggccagggtcctggagaggatggagagcccacgagtggctgcagctgagaccccgagggagcccaggaggttttgtcggaagaagggcgatctggaccttccctgaccagcgtctttgtgtcctttgagctccggacctggtcctgggttcctcccacctcgggctgtgctgcagttcaggacgccgcccccagggggcgctccaccttcagagcaggcggcaccgcggagcctcgggccccagagcccgcgctgtccatggtcctgcagaagggaggctcccaagggaacgagtcccaggctctggacacgtttgcagacagtactctctaaaaaggctacttttcgccacacattagaacaagatctcctccgggggaatcacattaaagcaaaaacgaagtcaccatcgtcactccacttctctcatcccaaacccaccctccccaagatataaagcccttcaaaatattcacactctttttttttttttgacagagactcgctctgtcgccaggctggagtgcagtggtgcgatctcggctcactgcaagctccgcctcccgggttcacgccattctcctgcctcagcctcccgagtagctgggactacaggtgcccgccaccacactcggctaatgttttgtattttttttttcttactagagatggggtttcaccgtgttggccaggatggtctcgatctcctgacctcgtgatccgcccgccttggcctctcgaagtgctgggattacaggcgtgagccaacgcgcccggcaatattcacactctttacagcgttattcccaaatgacttccacccaggcacattaagcatgtgatgtccacataagaaaatgcgctcctgggggcttttcaggtcattcatctttgctttgtctggattggggtcgtgtatatttcaggggctcttagctgggcctccgtcctttccttttcaagtcagaataacacgttgcagggcaagaagagtgaaatatcactagaggatagacttggattcaccctaatttctagtgaaggaaaaattttgcaagtgcaacactttattgtcagatataatagtgacttactggtgtgtgagtgtgatatgacactcacttcaagcattagttttccaaaataagattcaactccttatgtcaaacccctaagttgtctgtgatctgacacctgttacatatgtgcatttcagatattttcccccatctgttaacttttcttttactctcctgttatttacagaacagcaggactcttgctccccaaaacatgagttacccatgaaatgatcccctactgtggatggaaaagaagagccaagaagataaaaatagccctggaataaagagaacactaggtccatcacaggagagggtgaaaggtaaagagccttaaaaaggccaacctaggccggcatagtggctcacgcctgtagtcccagcactttgggatgccaaggcgggaagatcacctaaggttagcagttcgagaccagccttgccgacatggtgaaaccccatctctactaaatatacaaaaaaatcagctggatatggtgtcgggcacctgtaatcccagctacttgggaggccgaggcaggagaatcgcttgaacccaggaagcggaggttgcagtgagctgagacagcaccagtgcactccaggctgggtgacagagcaagaatccatctcaagaaaaagaaagaaagaaagaaagaaagaaagaaagaaagaaagaaagaaagaaagaaagaaagaagtcaacctaaatgcaagtgactttcaagaagaaacaccaatgctgtttaatggaatataacaaaatcaagcagccaatcacataaaaatcacaatgtccagtatatagagagaagaaaatcagaaaaaaattacataaatatcactttcaattgtccaaatttgaccagaactgtaaatttacagatccaagatactcaacctacttgaaacaagatatcactctctctctttctcttctctgtctttttctatcacacacactcctgctctccacacagaaagggacataataatcaaataattaaaactcagtgacaaacagaaaatattaaaattagtcagtgaaaaatgcaaacttccaaccaagaagtaaaaattaaaattaggctgggcccagtagctcacacctgtaatcccagcaccttaggaggccgaggtgggcagttcacctgaggtcaggagtttaagaccagcctggccaacatggtgaaaccctgtctccattaaaaatgcaaaaaaatggccaggcgcagtggctaacgcctgaatcccagcactttgggaagctgaggcaggcagatcacgaggtcaggagatcaagaccatcctggctaacatggtgaaaccctgtctctactaaaaatagaaaagaattagccgggcgtggtggcgggcacctgtagtcccagctactcaggaggctgagacaggagaatggtgtgaacctgggaggcggagcttgcagtgagccaagatcacaccactgcactccagcctgggcaacagagcgagactccatctcaaaaaaaaagaaaaaagaaaaaaaatacaaaaaattagctgggtgtcatggcgggcacctgtaatcccagctactcaggaggctgagagaggagaatcgtttgaacctggtaggcagaggctgcaatgagctgagatgaagccactgcactccagcttgggtgacagagtgagactctgtccaaacaaacaaacaaacaaaaaaacccagaaaactacagtagaatgcccataaattttgcaagtcaagggattttaaatacaaaagggaaaaaatgttaacctagacccaatttcattaaaaatatcatccctggttcacacctgaatctcagttctttgggaggccaaggtgggcagattgcttgagtccaggagttcaataccaacctgagcaacacggtgaacccccatctctgctaaaagtacaaaaattagccagacatgcacctgtagtcccagctactcgggggtactgaggtgggaggattgcttgagcctgggaggcaaaggtcacagtgagccaagttggggccactatactccagcctggataacagagggagactctgtctcaaaaaaaaaaaaaaaaaaaggattattccaaagtgaaagtaaatgaaaatgtttcaaaaccacagctgagagaattcatcaccagcatgctaacactataggaaatgaagtcttcaggctaaagaaaaatgatactgtagagaaaattatatgaacacataggaatgaagagcaattaaaatggttaataagtgaataaatttgaaacagcttattctgtaataaaacatctttttaaaaaacaaactcttttcaggcagggcgcagtggctcacgcctgcaatcccagcactttgggagtccgaggtgggtggatcacaaggtcaggggtttgagaccagcctggcccacatgggtgaaaccctgtctctactgaaaatacaaaaaaaaaaaaaaccacttagccaggcatggtggcacgtgcctgtaatcccagctacacgggaggctgaggcaggagaatcacttgaacccgggaagcagaggttgcagtgagccaagactgcaccattgcactccagcctgggcgacagagcaagactacatctcaaaaaaaaaaaaaaaaaaaaaaaaaaaaagaactgttttcaataaacatggagtttataccaacatattatggggatgaattcgtggcctatcaaaatcacattaaagtaagcatggagaacaagatattgcatggattataactcaaatcagtgataacacatatcagtctgtttcctctcctgccttcccaaccattcctatagagccataaggaagaggtgtggaaaacagaggtgaggggtggagagaggttgttctgcccaggaggtgggaccgaggcacccaggcgctccttgctccagccatctgcagagtgagagtcttaggacacatggtctgaaggaccctcacctccactggggacctggagcccagacctcagctctgctgtgaggagggagctcagtcaccgcaagcagccgtatccccttgggagcccgtgagcctgtgtgggaaacacagttctgagaggagagaccagtgctgtggaaggtgtgctctggggaggagaggataggtgaagccactcagggatttgagggctcaagttatagaacaacttgagaagggcttctcccctgtgcagacatccaggtgatgtcacaggttaaaagaaagccatccccattatggctcccctgagcagggtgaggggcagaagccaggagccccactgctctccagaaatttgagagcaggaacaggcggtacggggagggggctgggggaaggaagacagaggtgggggtgtcctcagcccactcttcccttgcctaaggcgcccccaccagaatcaggtgttctgctaacactcaccctgcacagccaggctcagggagatggggtgggagcccagcagggcctgagcccagcaggtgaattctcttccatcccctaaaaccacctggggcagctccaggacccggggatgcaagggttggcaggggctcaggatcaggctgccctgggaccagctcaggctggcagaagggctgctgtcagcatcacagaccaggtgcagggactgccctcctgcaccagcagagaggcagcattgcccagaatctatgggactagggaaaccgagagagctggaggggagggctgagaggcccttctctccctgcgccttcccccagactcaggagaggaaactgcgtttctgagacaagcatcacaagcaagggcaagtaggggcgaagacccccagcatgcaggggtcgggaggctccttaatggtcccgggacaggggcatggaaacatgcggaggacttggccgtatcgggacacggagagaacgtcccaggacgaccggccttgatgtgcaaaaccgtggagggcactaaccctcgtggttctggccacttggaggaaccaagacaggtgacacacttgggctttctccaggagccacaggagccaggggaggagctgagtagggatgtgactgggaaagatttggttaaagagagactcctctttggggcccgaattgtggtcattgaagggagcaagaccggaggctgctaggccaggagggaggctgctgcaggtccaggcatcacccgggtccaggtaagcaaagttagactttggctaagtgggactgtggctgtgagaatggaggaagggagggatttgagacattttccagtagccaagtttgtggagctcttgcctcatgggaagacttcggtgaaattctgagatgtgtaaagaactttccaggacattgactgagctgactcacatgggtgggggcgcctctcaaggggaagtgatttgtgctcagaacaagctgcaccagacagaaatttgtgggcatcttccaggcagaggtagggctaggatacaaacttcctgaaagggtcatgcagagggaggctggaggcctggggcgccactttgagctagtagccatagctggggtaaagtcattccaacaaggatcattgttgcctattccattcattaattccacatttcctggaccccatttatttcttctttgttcaccatttacataaatattgactaatgacaatgcctagacctgattagatgaagtggtcgacagggtaatggcccccaaagatgtccacttgctaatccctgtgaaaggcgttagccagcttgcattaggcagacagtaagggaagggtcccctgagaacctctgacccacctgataagcagttacaccagatgttttgtgcagataagggaacttgcacagggggcttgcctaaacaccccagcaggggactaagggcccacaaacgcactgggggaatggggtggagccatcaggaattttcaccttatacaaacaggtaacccagccccatcagcttatataaaagcccttgtggctggttgcagtggctcatgcctgtaatgccagtattttgggaggctgaggtgggtggatcacctgaggtcagcaattcaagaccagcctgaccaacatggtgaaaccccatctctactaaaaatacgaaattagccgggcaccgtggctcacaactgtagtcccagctactcaggaggctgagacaggaggatcgcttgaacccaggaggtggaggttgcagtgagctgacatcgcacaactgcactccagcctgggcagcaagagcaaaactcctaccccacccacctacaaaaaaacacaaaaaaacaaaacaacaacaccttgtattcaactgtgagggggtaaccgagaacctgctttcaggaaccctctctttgctgagagctttcctttcacttaataaattctactccactccatcttcaagtgtccacatgcctaatttttcctggtcatgagacaagaacctggacctagctgagctaaggagccaaaaaccctgcatcacctggaaactgtgaatatgttgccatacaagataaaggaacttttatccttcagagccaacagccaagagttgcaaaaaaaaaaaaaaaaaaaaaaaaaagacaaagggactttgcagatgtgattaagttcaagttcaagatcttgagatgggcagaagatcctgggttatccagatgggcccagtgtgatcacagtgtccttataagaaggaaagggggagaatcagagtccgagagacaagatgtgaggatggaacaaaggtcagagaggagaaaagatgccacgaagttggctctgacaaccaagaaatgggccatgagcccggaaatgcaggtggccactgaacggtagaaaaggtgaaagaacagagtctcctctggagcctccagaaggaatcagccttaattttatagcccagtgagtcctcttccatccttctgacctccagaactgtaagaaaagaaattgtcttgtttcaaaccacgaatcctggggtaatttgttagagcagcaacaggaaaatagcacaggtgaggactaattgcactgcttcctccccagatcctacaataaactcaatgctattctttccattttatgtaaaaggacattagggctgaggaattacggataatctctctgagttggcgcacgtggtggtgatggattgaggatccaaataaagagtcaaaaaattatggaattcaatggagggcccctgaggcctgggcagggcaggtgtggctacagaaagagcccctggaagatgcctgcctgaccctgatccaggttactctcccgtgcagggagcagacaataaaccatgaacataattatgcagctgcgagttattaagcttgatggaggggagccggtgcagtgagagaaacaaggtcccaacacaatgcagcctctggggtccaggagccccactgttgtggggaaatggggtctggatcccacggtaaagggacgtccataggaataagcggggaggctgacacagccgggttctcaggtgcgtcttcctcattggattctcctggggctctgtcctgtgaacttctcttctctacctgcaatcagctcttaccctttcaaataccttttaattttggtaaaaaggaaatgcagaacataaacatcaccattgtcattatgtttatgtgtacggttcagttctgtgaagcatattcattctgttgtacaaccaatttccagaactcttccatattgcaaaattcactctgtacccacaaaacagcgactttccattttccctgtcctgggtgcctggcaaacaccactgtactcactgtttctgtgaatatgactcctttagaaatctcagtaggtggaactgtgcagtatttgacttttcatgactgtatttcccttaggataatgtcctcaaggcccagccttgtggtagcaggtgtcagaatttcttttctttttaaggctgacaggttcaaatgtatgattttaccaccttttgcttactcatctgcctctccagaaatccacctcttggctctggcgaatgatgctgccatgaacacgggagtataaatatctattcaagttcccactttttttttttttttttgagacggactctgggactctgttgcccaggctggagtgcaatgacatgatcttggctcactgcaacctctgccagtcaggttcaagtgattctcctgcctcagcctcccgagtagctgggattacaggagcctgcccccatgcccagctaatttttttatttttagtagagatggggtttcaccatgctggccaagctggcctcaaactcctgacctcaggtgatctgcctgtctcggcctcccaaagtgctgggattatactcgtgagtcaccatgcctggccctcaagttcccactttcacttcttttcatgtagaccagaagtggagtggctggatcctatgtgaattctatttttaattattggaggaattgtcatactcttatcatcctctttccccatcatctcttgtcatcactttataaagatttactctagagtagtcccccatccacagtggatagcttccaagacccccagtggatgcctgaaaccacagacagggcaaaccctatatgtgctacatttttatacacacacacacgtatgtatatcgatgataaattttattttattttatttttttgagacagagtcttgctctgtcaccaggctggagtgcagtggcgtgatctcagctcactgcaagctccgcctccatggttcaagagattctcctgccccagcctcctgagtagctgggactacgggcatgcatcaccatgcctggctaattgtcttctttgtatttttagtagagacagggtttcaccatgttggccaggatggtcttgatctcctgacctcaagtgatccacccacctcagcctcccaaagtgctgggactacaggtgtgagccaccgtgcccagcctcctactctttctctttctcctactctggccttgtaagacctgcctgcttccccttcaccttccgtcatgattgtaagtgtcctgaggccttcccagaagcagaggctgctatgcttcctgtacagcctgcagatccttgagccaattaagcctctttcctttctgaattacccagtcccaggtatttctttatagcggtgctagacctgactatacaatatgtaacatatagtttgcaatttgtaacattctacagggtacaattcagtgacattaagcacattcaccatgttgtgcaaccactatttaccgaatttcctcatcatcccaaacagaaactctgcaccatttgcacaatcacccttcttccttgccctgttccccagcctctgatacgcaattctactttctgtctccatgaatttgccaattctaggtaaggctacataagcagaattatatactatttgtcattttatgtgtggcttctttcatgtggcatgttgtttcaaggttcacccatgttatagcatgtatcagttccattcaatttttaaggctaaagaatatcccatattatggatatggaaccttttttctatccacttatcagtcaatggacgcgagttttttttttccccaccttttagctcttgtaaataatgctgctatgaacattgatgtataggtatctgtttaagttcatgctttcaattctgggaacatatctaggaatcgatggctggattacactgtatttctaggcttaactttcggagagaattccaaagagttttccacagggtcacaccattttacatgcagtgcaaaggggctcccacttgtccatattcttgcaaacaattagtatttttttttcttttgagacggagtctcaatctctcgccaggctggagtgcagtggcaccatctcggctcactgcaacctccacctccttggctcaagcaatcctcccacctcagcctcccgagtagttgggaccacaggtgctcactgccacgcccggctaatttttgtattttttgtagagatgaggtctcaccatgttgcccaggctggtcttgaactcctgacctcaagcaattcttcctctttggcctcccaaagtgttaggattataggcgtgagccactgtgcccagcttatgctttatattttaagagttctagtgacagtgcagtggcatcttatgtttaatttttaaaaatttacttaaagttagatatggttgaattcattctttatcatatgtaattttatgtgggttgaccgatgcatatagttatatacacaaccgctgtgaagacaatgaaaagtgtcattacctgaacatttcctccctctgctgactctaggtagtcaatcctccctctacacttagtccctgagaaaacacggatctattctccatccctgccattttgcctttttatagaatgtcatataaatggaatcatacaaaatgtatcctctaaaatctggcttcatttacttggcataatgcttttgaggctcatctatggggctgggtataaatctgtcattttagtttaattgttgactggtgctccattgttttcatggtctctcattttgcatgtatttgccatttgcggagcattgcaactgttttcaggttctggtgactctaaaataatgttgctataaacattccattcaactttctgcgtgtgaacataagtttttaattcccttgagtaaaaacctaggagtcgagtgcttggtcagacgtacacttggtcaagtgtaagtttaaatttatacaaaattgacaaactattctccaaagtgtatataccattttgtattcctaccagcagtagacatgagctctgatcacttcacatccttgctagcatgtgatatcatccacatattttaaaatttcttgttacctttgttgtacttttcagtcatttttcttaggtatgtaattctacctcattcttcttctattctacaattacctaatgacaaattatattgaggctattttcacggccttgttcgccatctgcttttcttttttggtgaggtggctatgaaatcttcagtagcttttttcttaattgtggtaaaatatacagaagaaaaaaattaccgttttaactatttttcagtgtttagagaagttgcaccaagtacactcacgttgttatgaatcactatgatttatctccagaagtttcttcaccttcccaaactgaaactgcatcaaagaggtgaaaaccccctatttctttctgatcacagcccctggcaagcatggctctactttccgtgtctgtgaatttgcctcctctacacacctcatataagtggaatcatacagtgtttgtcctgctgtgactgacttagaatatatttaaggttcatccacgctgcatcatgtgctagcttctccttcttttttttttttttttttttttttgttgttgtttgagacggagtttcactcttgtcgcccaggctggagtgtgatggcgtgatctcagctcactgcaacctccacctcccaggttcaaacaattctcctgcctcagcctcctgagtagctgggattacaggcacctgccaccaggcccggctaatttttttttttttttttttttgagacagagtttcgctcttgttgcccaggctggagtccagtggcgtcatcttggctcactgcaacctccacctcccaggttcaagcaattctcctgcttcagcctcccgagtagctgggatcacaggtacgtgccaccacacctggctaattttgtatttttagtagagatagggtttcaccatgttggtcaggctgctctcaaatgcctgacctcaggtgatccacccgcctcggcctcccaaagtgctgggattacaggcgtgagccaccgtgcccggcctgtattttcttttctttttttttttttttttagtagagatggggtttcaccatattggccaggctggtctcgaactcctgacctcaggtgatccacctgcctcggcctcccaaagtgctgggattacaggtgtgagccaccatgcctgtctccttggtttttttgtttgttttgttttttgttttctttttctttttctttttttttgagatagggtcttgctctgttgcccaggctgcagtgcagtggcatgattgggctcactgaaacctctgcctcccaggttcaagcgattctgctgcctcagtctcccgagtacctgggattacaggcacatgtcatcatgcctggctaatttttatatttttagcagagatggggtttcatcatgtgggccaggctggtctagaactcctgacttcaagtgatatgcccacctcggcctcccaaagtgctgggattacaggcgtgagccaccatgccccagcccagcttctccttctattttaaggctgagtaatattcaattgcatgtatacaatacactttgtttattcattcactttttaggaatagcagggttgcttttcccttttacctactgtgaatatgcttctgtgaacacagatgcataaaactatgctcaagttccggcttttgatcttttgggccatatacccagaggtgaaattgctggatcataagatcattctatttttaatttttttgaggaaccccactactactctctagagcaacttcaccatttaactttcccatcagcaatgcacaagagttccaatgcataagagatcacatggacagctcagcaagctgaataatggccacccaaagaaatacagtctcagctccttgaacttctaaatattaccttacaaataaagtgtctttgtataattttttttgagacagtctcactctgttgcccaggctggagtgcagtggtgcgatctcagctcactgcaacctccgcctcccaggttcaagtgattctcctgcctcagcctcctgagtagctgggattacagacgcccgccgccacacccagctaacttttgcatttttggtagagaccaggtttcaccatgttggccaggctggtctcgaactcctgacctcgagtgatccaccagcctcagcctcccaaagtgctgggattacaggcatgagccaccatacttggccactgtgcagagaatactgtagccacatggaatacatgtggttagggcactgtgttagctagtctgggctgccatagcaaaatactataaattaagcctcctataaacaacagaaatttatttctcacaattctggaggttagaagtccaaggttagaagatcaagttgtcagatgatttgttttcttgtgaggctctgtttcctggcttgtagatgccaccttctcactgtgtcctcacatggttgagagacagcaagttctgtggggtctctgcttataagggcactgtattagtccgttttcacactgctggtaatgacatacctgagactgggcaatttaccaaagaaagaggtttaatggacttacagttccacgtggccggagaagcctcacaatcatggcagaaggtgaaagtcatgtctcatatggcggcagacaagagatgagcttgtgcagggaaactcccctttttaaaaccatcaatcttgtgagaattattcactatcatgagaacagcacaggaaagacctgcctccatgattcaattaccagccgcaatgtccctcccacaacacgtggaaattcatgatgagatttgggtggggacacagccaaaccatatcaggcactaattccatagtgggtccccaccctcatgaccccatgtaacataattacctacaaaaagccccatctccaaatacatcacattggtggttagggcttcaacatatgaattttgggggaacataaacatgcagttcataacaggcattttactgaaaccttgtcatctcccatgccatgagtttagatcaacaaataatcatgcggaaaaaaaatctatatagaaatttcttacagcaaagcctctgctcattttttcgataatctcatttttttaaattgcaaggaacagaaatgaaaaccgatagcttaatctggaaaagaagggttttattaaaaaaacacgtttgcttaatttttggcccaggcagtggggaatctgggaacatctcctaactcaaggtcaagatcagcacatcactgatatccaatgtgaccctcagggtgctgtttcttgctctccgcatggtgggctgcaggtgcctgagccatcttcattctctggctagcaatgttcgtgcaatgtgaggtctccccagctcaaggctcatgccgttcctgcagctgaaagggagagcaacacctccatcctgtaagctccaacagcatcttcccgacagccacgaggagccacatccagttctttcctccatgtttttatgagcgaataggttgactggagtttgaacttctgggttcaaaccctcagaagttcaaggttcaatcccccattgacctattcccacactcgatatccatgataagaatgattctcagggtacattgggcttgttgacaaagaaaggaggattttttataagaatttccatctctgacttttgtccaacaattagattctattccttgtttctaaatgaaaatatgaagaaacacatcctttcggaactaaaataaataacactttgaagttgaaacagagaaaatatgaggctgcacatggaattagtaggaaattatgctctcatttgaggttattctgatttcgccaaggaagatttaagctcaaaaggtaaggtggacagggaatcaccccatggtgagacacatagggatattcgggcatagagtacaagctaattaagcttgatatgtacgaggaatttctcttagtaatcaatgagaatgtgaagtgtacagaaaataacttttgatgaacaaggaagagcacatgaatttacatacaagaaatctttcctcactgggcaaaaagctcattcaatttctttctttttttcaagccagagtctctgtcacccaggcaggagtgcagtggcatgatcttgactcactgcagcctcaacctccttggttcaagagattcttgtacctcagcctcccaactagctgggattacagtcgtgtgtcaccacgtcccactagttttttgaatttttggtagagatgaggttttgctatgttggccaggctggtctcaaactcctggcctcaagtaatcctcccagcttggcctcccaaaatgctggaattacaggtgtgagccatcatgcccagctttattcagttccttaaggaggatgagcagcattgagcggatgggaatgtgccttctctggagacaggtttgcatgtagagatgccatcataatttataaggacaggttttctcttttttcctattttttagagatggtgttttgccatgtttcccaggctagtctccaactcctgggctcaaatgatccacttgccttgacctcccaaagtgctgggattacagatgtgagccactgtgtatggctttcttttttcctttccttttcttttcttttcctttttagacggagtctcactctgtcactcaggctggagtgcagtggtgcgatctcggctcacttcaacctccacctccttggttcaagcgattctcctgcctcagcctaccgagtagctggaactccaggcgcgcaccaccatgcccagctaatttttgtatttttagtagagacagggtttcaccatgctggccaggatggtctccatctcttgaccttgtgatccgcccacctcggcctcccaaagtgctgggattataagcgtgagccaccgcgcccgaccccaggacaggttttctaaggctcatggcccttggccatttgctgcatgatctccatctccatagggctttgtagcagctctcattgcctctcccacaattcatgcatcaggcaatgcccaggaaccacaagagtataattaatattcacattcaaaatcatagttgtttctattcaatgttatagcatgcttttttttttttttttggcttttaatgaaaaaaagcattgatttctgttgtcttggaaatcagaggggtagacctggcttcaacggtggctggatttcagggtccgatgatataagggctcatctctctgtttgcttttggctcttgttcttgtttgttgttgctgctgtggttgttcatttattctgcctggtttttgttctcaggctaataaatgtaggagctctgatgtccactttgcagatgaggacgctgaggcatacagagatcaagtaatttcccttctgaggcagagtccgtggacttcccacagccccatgacacccccttatggctgtgtatccaactcaacattccctgccctgatcagggcgccccctgctgctcacccagagatttgccaggatccctgcaccaatctcctccaccctttttgactcccaaatgcttcttgacacctgactcccaccctgtcactcagagactaacctatgtcaagatttacaaactccccgggtgcggtggctcacgcctgtaatcccagcactttgggagcccgaggcgggcggatcacctgaggtcaggagttcgagacgagcctggccaacatagggaaacccccatctctactaaaaatacaaaaagtagctgggcgttgtggcaggcgcctgcaatcccagctattttgggaggctgaggcgacagaatcgcttgaacctgagagtcagaggttgcagtgagccgagatcgcgccattgcactccagcctggacaacgagagagaaactctgtctcaaaaaagaagaagaaaaaaaaaaaaactaaacaaacaaaaaacaaacccccaaaaacaaagatttacaatcttaccaaacaggaatggtaactacaggaagtagttactatctgaggttattggtaatgttattgctattgttaatgtcacttttttttcccactcccattttctctggaagccgtttgggaggtcctgcctctcaccttctctatccacttcttactcctaccagaggttgtagacaaagatgagggttgatgcattgtgcaactctgtggctccccctagtgatatgatacatttggggtgatggggtttgcctagacagggccccaaggatgctggtagggagcaggtagggaaccccaccttgtgtacagctcctcaaaaatcccaggttaacattccatttggtctccaggcctgataaatggggaggagtggctgttcattagtgtgcactctggctgcaccgggcaggactttgccccgggagggactgtgacgttctgctctcttggtaagaaggtacaaagctgggctccagaaatggattgagagctccttgggtctgctccccaggctgccacccgcccccaggtgagccctggatactgctattcctgactgaagagacagggttttggacaaggtgctccagaaggccagatttctctctgggcaaggttcatgtgtttcccacacaagtctacttctgggattcttcatggatctacaaatcggactaggcaaaagctgtgcatgctgctgtgtatacaaaatagtaaaccctgatatagacgatggactttgggtgctaataccgtatcaatggaggttcatcaagtatgacaaatgtaccactctggtgggagatgctgataatagaggaggttatgcatgtgtgggggcaggtggtatatggagaatctctgtaccttctgctcaatctgtgaacctaaactgctctaaaaattatgtctatcccgtcatatgcttctgggaaaaattgtctatatatattttttaaatggaaagaactggctgggcatagtggctcaagcctacatctcagcacttaaggaggctgaagtgggaggattgcttgagtccatgagtttgagatcagcctgggcaacataggcagactctgtctctacaaaaaaaaaaaaaaaattagctaggcatggtagtgcatgcttgtggtcccagctactcgggaggctgaggcaggaggactgcctgagcctggagggttgaggctgcagtgaaccatgatcatgccactgcactccagcctgggcaacagagcaagaccctgtttcaaaacaaattgaaaaaagcttaatgctcctaaatagggtattggttgaataagtcaacacacatcaaattcagtggaatactatgcagccatgaataattaacagtagtggtgcagagctgttgcttctccagtggggatccaggacccaagggcagggcgtgaaaagtgcttcagaggagctaaaggcagaaggtccactttgcatatcttctggggatgtcatttatactcaaatactgagtcaggtcaatcagacaactttagtgacaatgaatgcattattttcccgttgaaactaacagaaacgtgtttttccataggccacaaacattcatagggactttcagagtaaaacagaagacttcagagatattttgtaattatatctagatacagaagacttgagatattttgtaaatatatgctagacactcagagctgtatattcaccttcctctgattaaatttgcccttaatgtttcagaattcctaataaaggacatttaagaatatgatcccactttggtaaacattatgtatatgtgcatgagtgtatataacacatcaaaactgaaaagagaggatggcagattgcaggcattgttagccggcctctcccaccttggaaagatgaaacagtgtataaagatttatgttgtgaccttttcaccagggaccaacacaggaacttaacaggaaaactggaagaaaccacagacctttctaaagaaacggtgggcagcagcctacaccacgagccagacagaaaactgtgagtccccacagtgtgagaaggggagagactgactcagggatgtgcactcccactggggtgccacgcagtccaggccacaggagggggaagccctcaccctgcccagcactggagctgagttagggagcgttggggagtagataaggagtcacattgggatgtgcttggcgtgcagtcctgggctccagcagggacagagggaagccattcccgatgctacctcacagggggccttgcagaagccagctagctgactcaggaggcggtcacgggttgagagaagctcccgactgagatctgcaatgtcatcttgagtggggaaagtagacttgcccgaaatctaagactcataggtgttcttgagggagaagaaaaagcaaaaagttgagaaaattcaatgattggaaagatacagaatcaacctaagtgctcttcaacccgaaggaaaggctacaaaagaatacacatccctgagtcagtctctccccttctcacactgtggggactcacagttttctgcctggctcgtggtgtaggctgctgcccaccgcttctttagaaaggtctgtggtttcttccagttttcctgtgaagtctctgtgttgctccctggtgcagctgcagcgtaagtaggttagacaggcgtttcacagcctcccttacacagcctcccttaaagggaaacacatttgctaaatagacggagagaacaatccgccggacagctcgcaaaccccgacagcgcataaaccgcatcctgggctcgtggtcaaaacatcctgtagcaaggaggtagaagggaagaagggacagtccccatatccgtgcaagtgcagaaacccatgcttaggtagtgtccttgggctgacctatgctcattataatagtgaaaacacaccctcacgtggagacttaaggtgctactgagacagcgatgtatatgcactagcatgtacagccattgcgcatgcgggcctaacagaccacccagaacacgcttaagagcaacaccgtcccacccacgcatgagtaatcacggaagattcccctaaagggagtttccccagcgtcagtcagcgctgtctcacctttgagcagccgctctgaccagctgttaagagtgcacgttcactttgcaattaactctcttgcttacttttaccttggactcactctcgaattcttttcttgaggcaaagtcaagaaccggaactggcccaccagccatagcaggggagactgtgtgtgccgcggtgcaggcagcactcatgccgggaatggtgaggatggcaccagcttgtcggattttttgttggcatttgtgtttgtttctctactcaccacccaagtgataaaataggatccttggtgtggaacttagaattatgccaaaaagctaacagttctcctttctagccagctacaaagccagaccatgcccaccactgccatgcttgcaaaacgggtcaccacggcctgtaggtgagcagttgtgtaggagaaaagaatccaatttttttgtgtgctctttactattatgtagacagctccgtcttcagcccacactttggttccctgtggatttcagtttgtgtcctgtgtctgaggacagcggactgaatacagtgattttttacctccaataaatgtcatcccgctgcccttcctgtgcctcgagggttgtctgtttttctctttctttttctttctttctctttctttctttcttgcttacttttctttctttccttccttccttccttttctttctttcttgtctccttccttccttccttaactccttctttctttttgacagagtcttgctctgtcactcaggctgaagtgcagtggcattatcccagctcactgcaacctccaccttccaggttcaagcgattctcctgcctcagcctcccgagtagctgggattacaggcgctcgccaccacgcccagctaattttttgcatttttagtagagacggggtttctccatggtgcccaggattgtcttgatctcttgacctcgtgatctgcctacctcggcctcccaaagtgctgggattacaggtgtgagccaccgcacccggccctgtttttcactttctttttttttttttccacaggattaaaattatttattgaatagacatttatggagcatctattataacaggaaaaagtaccaggccctgaagacacaagaataaaatcaagcgtttacaacttacaaaaggagaaagacaagtacaccacagtgtacagcaatatttatagtactgacataaagtagtcatagatatggtgttcgggggagcagtgaaggacaaggaccaggacagggaactccattttgagcagagtattaaaagatgactaggataaaatcttaaagaaacgatatgctatgcattccatgaaaacaaaacgaaaaacaccagtgtgctctgcctatcaggattcaagctgccttgtaaatattactaattattcatattaggaacacactagtcaactccattaaaaagccactttccatccctgcataatggtagctctatgaatttgtgattcagaccatattccctcaaacaaatgcattactaaactttgactagacatcagaattgttaaacaataacaaaataaaattgaacaactgaataaagctgaagccctgaacagcctaactggaaaaggagaagaccctttaattggtcatatacacctcttgacctgtatttggcaatctgctctccgaccgtcaacagataagcagcacagccctcaaggttggagactgatctttggtaaagcaggcatccatcccagatgctgctgtctcccgtacacagccctcagagccaagggaggcctggaacctgagaagtttatttccaattaggacagttgcctatacttctcattcgaagcatccagagacaagggccagcccaacccccaatgccaggagccaaggcagcattatcttctgtatgagttcctgacccagaggtgacctgcacgatttcttctgtgtccgctgagggccatggaagaattttctcagctcggctattatgtaaactctaatcttaccagtggcaacatggcaaccacaaatcccaagtcccaggaggattatacttaatggagagaactcactggtctattgggactattggcactgcaaaaatgccataaagagctatttatgacaaacccacagccaatatcatactgaatgggcaaaaactggaagcattccctttgaaaactggcacaggacagggatgccctctctcaccactcctattcaacatagtgttggaagttctggccagggcaatcaggcaggagaaagaaataaggggtattcgattaggaaaaaaggaagtcaaattgtccctttttgcagatgacatgattgtaaatttagaaaaccccattgtctcagcccaaaatctccttaagctgataagcaacttcagcaaagtctcaggatacaaaatcaatgtgcaaaaatcacaagcattcttatacaccaataacagacaaacagagagccaaatcatgagtgaactcccattcacaattgcttcaaagagaataaaatacctaggaatccaacttataagggatatgaaggacctcttcaaggagaactacaaaccactgctcaacgaaataaaagaggacacaaacaaatggaagaacattccatgctcatggataggaagaatcaatatcatgaaaatggccataccgcccaaggtgatttatagattcaatgccatccccatcaagctaccaatgactttcttcacataattggaaaaaaagtactttaaagttcatacggaaccaaaaaagagccctcattgccaagacaatcctaagccaaaagaacaaagatggaggcatcacactacctgacttcaaactatactacagggctacagtaaccaaaacagcattatactggtaccaaaacagagatatagaccaatggaacagaacagagccctgagaaataataccacacatctacaaccatctgatctttgacaaacctgacaaaaacaagaaatggggaaaggattccctgtttaataaatggtgctgggaaaactggctagccttatgtagaaagctgaaactggatccattccttacaccttatacaaaaattaattcaagatggattaaagacttacatgttagacctaaaaccataaaaaccctagaagaaaacctaggcaataccattcaggacataggcatgggcaaggacttcatgtctaaaacaccaaaagcaatggcaacaaaagccaaaattgacaaatgggatcgaattaaactaaagagcttttgcacagcaaaagaaactaccatcagagtgaacaggcaacctaaagaatgggagaaaatttttgtaatctactcatctgacaaacagctaatatccagaatctacaaagaactcaaacaaatttacaagaaaaaaacaaacaaccccatcaacaagtgggcgaaggatatgaatagacagttctcaaaagaagacatttatgcagctaacagacacatgagaaaatgctcatcatcactggccatcagagaaatgcaaatcaaaaccacaatgagataccatctcacaccagttggaatggcgatcactaaaaagtcaggaaacaacaggtgctggagtggacgtggagaaataggaacacttttacactgtttgtgggactgtaaactggttcaaccattgtggaagacagtgtggcaatttctcaaggatctagaactagaaataccatttgacccagccatcccattactgggtatatacccaaaggattataaatcatgctgctataaaggcacatgcacacatatatttattgcagcactattcacaatagcaaatacttggaaccaaaccaagtgtccatcaatgatagactggattaagaaaatgtggcacatatacaccatggaatactatgtttttcactttcactgtggttgtttggcaactgaatccactcaatatgcaatagacaagacagagatcgagagaaggagaaatgagaagcccatgtgggagcagaggctgcaataggaaaggatgaagcctgtttttgtggatccccctcactcccctgatgaatcccttcttcagctactggtttaggcgactgctgatgaaacccagaagaggaagactgggtttgtccgtatgaggcccctctcatcaggctggaacttggtaactggctttcacttatttatttggagtctgaaaggaatcaacagctcttttgggaccaatggggcaaatggaacctacacaaaccaatcgcttgcagcaagccgtgttttatagatctataaatctataaaacatttacaaatgcaatgtttttaatatatttataaatatataaatttggattttccaaatcaggtgaagctctcctcagtccccacctgtataactaaagaaagatgtgtggctatgcaaagaagccaaacgtcattaccttcctgtagaattagggtttttgttaataatacttcgcaatttctaagaagttgtttgggatattacatgggttattaaaattctgtgtactgagttatttttcaatcatgaaggaaaaaaaaagtcaatccactgaacaagaatttaccaagcagtcatttcagggagttcccgttgaacctgtgattcggtagtgcactcccttgatcacagcagggacgtttaaagagaaagacattttggtctggattagctctaacgctagacactgaagttacaagaaatctgtatactgaatggcaaaggcgacttccagtacactccccgctgtctgggaagaggcatcctttgaccgttttagcaaatctgtttatgtgtctgtgcacgtgtgcacgtgcatgcctgtgtcaaaattgggagtgttgcttaggcagtgtaacgtttcacagttgtgtgcagcaaacaagctggtttttagaaactagcagccagcgtttcagggaggagggagagctgccacagggtcctccctgtgggttactatgaatgcactgtatattggagaatatctcgatccaaacaacagtcattcctgagtggtccttttgtatctggaattggttccttctggtgggttcttggtctcgctgacttcaagaatgaagctgcagaccctcgcggtgagtgttatagttcttaaagaatggtgtgtccagagtttgttccttcagatgttcagatgtgtccggagtttctttcttccagtgggttcgtggtctcgctgacttcaggagtgaatccgcagacctttgcagtgagtgttacagctcttaaagatggcacgtccggaattctttgttcctcccagtgggttcctggtctcgctggcttcaggagtgaagctgcagacctctgcagtgttacagctcataaaggtagtgcggacccaaacagcgagcagctgcaagatttattctgaacagtgaaagaacaaggattccacaacatggaaggggacctgagcgggttcctgctactgactagggtggccagtgtttattcccttctttggccccacccacatcctgctgattggtccattttacagagtgctgattggtccattttacagagtgctgattggtccattttacagagtgcttagtggtctgtttttacagagtgctgattggtgcatttacaaacctttagctagacacagagcactgattggtgcgtttttacagagtgctgactggtgcatttttacagagtgctgattggtgtgtttacaaacctttagctagagacagagtgctgattggtgcatttttacagagtgctgattggtgcgtttacaaacctttagctagacagaaaagttctccaagtccctactggacccaggaagtccggctcgcttcacctctcactttgttgctctcctgttttaattttattttgaaactcttgggtgcgtcagggtcttggtactgatttattgttgttgatccagccaaattagccatgtaaaaatagcacctgtgtaagagacgagcagcatcttggtagcctgatactttgggcagcttgatgctgatggtggtgtgtgggaagagaggggataccaatcacaagataggagaggagggcctggcccttgggcacctctgggaaagcgtagggaacacgaggcagccagcccctggcaggggagactgtgtgtgccgtggtgcggtgcaggcagcactcatgccgggaatggtcaggatggcaccagcttattggattttttgttggcatttatgtttgtctctgtactcaccacccaagtgataaaataggatccttggtgcggaacttaaaattatgccagaaagctagcagttctcctccttggggacttgtcttaaacttgcctggtttgtacgtttctggccggacacgtgaagaagcaatctgtgacaagtctgagggtcttcctttcaacctgcctcccacgcgaagaaaagtcggtgtttcccttctgggaactgttgtgaatttctctttatctgtgaactgttttggttttgtttttaattgctctgtactccctctgaatcaaggcttctaccactgccggtgaaaaccacaaagggatctgcttgaggcgccatcctggccaagagagcaaacctgcaggaggtttggaaatggactcagtctctgcaaaagcgtgtgcactattaggggatgaactgtgtcacagccaggggcacaaagctcgtgttgtaggtgatccaggagacgtgagttcccagagattgttttgtgcattcatttgcacactgttgtcggggttggacttgtgtttcaggcttcaatgtgaggctcgtgatatgcatgtcctgtttatcagtaaaaaaaagttatcaaagtggttgaatcctgtgacttggcaagtatgtgagaatccagtacacatgactcttcaacttcttcctttaatgtcacttttataggaaatagaagtaaccaatatgacagttctcaaaaaaataaaacaaaataaaaattaggtcctgagcaggaaaaccaaatgaaaaaagtggaaacagggcacctggaaatctaaggctttgctgtgcttttctgtatttcccaattttcccaacagtgagctttgatttttgtgtttttgtttgttttcttgcttgttttataaccaggtcaaaacaatgtaagcaaatataaaaataaataaataataaactaaaggaaacataaagtgagtgctgggtgagaggtgcctctgttcccctgattaaggcaccctttgtgccttggggcagctgcctggattcgacctggaccctctacttgctggcctgtgtggtgctgagcagcttacccgggctcctctgtgacctgggtagagccagccctcttgagagtcactctgaggcctgcagagacaggatgggtccagttcccagtgcatagcaggtgccagcaggtgtgttggtgtcaggtgtgttggcttcttagggcttccatatcaaattcccacaaacttggtgacttaaagccacagaaatttattctttgacgttatgaaggccaaatgtcccaagtcatggtgtcattgggctgtctccctcggaaagtgctgggaagactcttcctggcgtcttctagcttctgggggctgtggcagcaaaaccccaacctctgcctccgctgtcacgtggccttcctccctatgtgtgtcttgtgttcaatttcccttattgcattaggacaccagtcatggcacttagggcccacctcatacagtatgacctcctaatattagcttggctacatctgcaaagactatttccaaataaagccacagacatagatactgggagttaggacttgaacatatctctctgggggacaagattcaacccacaacaactccattatcaggatgatgagaccctctgatgtttcctgtgtccatctccagcccctccctctgtccctcctgagctgctgaatgtcatctccacaggacatcctggatactctcgaaaggccagcatgggaatccaacctcattgttcctatctcagccctgccccaaatcctagagagaaatggaaacatctcaatacactatcatacaaatatgttcacagcagctgtcttgataattgccacaaccaaaacagtatcaatgaataggaaaaaataagggaatgaattgtgatttgctcatacaatgcaatggtgtcctactcagcaataaagaggaaaagatactgacacacacagcatggatgaatctcaaaacatgcaatgcggccgggtgcggtggctcatgcctgtaatcccagcactttgggaggccgaggtgggtggatcacaaggtcaggagatcgagactatcctggccaacatggtgaaaccatgtctctactaaaaatacaaaaattagctgggtgtggtggcgtgcgcctgtagttccagctactcaggaggctgaggcaggagaatcacttgaactcgggaggtggaggctgcagtgagccgagatcacgccactgcactccagcctgggagacagagtgagactctgtcttcaacaacaacaacaacaacaacaacaacaacgcaacactgagtgaaaaacaaaagacacaagaatacacattgggtgatgccaattatatgaagttcaagggacatggaaaataatatctggtgataggaatcagaaagtggtggctctcagggctagggattgactgggaaggacaccaggatctttctggagtgaaggaaaatttctctatccttgattgagaagctggttacacaggggtgcatgtttggcaacactcatggcatggcacatgtaagagctgcgtgattcaactgaaaagctaacgctatttttaaatttcaaagaacaatgtgttagcctgttttcacactgctattaagaaatacctgagactgagtaatttataaatgaaagaggtgtaattgactcacagttccacatggcgggggaggcctcaggaaacttacaatcatggcggaaggggaaccaggcacatcttacatggtggcaggcaagagagaagagcaggggaaaccaccacttacaaaaccatcagatctcgtgataactcactcactatcagaacagcatgggggaaccacccccatgatcctatcacctcccaccaggtccctcccccaacacatggggattataattctgattacaattctagataagatttgggtggggacacagccaaaccatatcaaacaaacaacctgcaataaaaaaaaacgttttaaattgggggtaaacaaaataagtacagacccgccatacaggttgggcagggggtcccggccttcatctcctcagtgcacctgtcttgttcctgagactctaggccattgctgctccctcttttgtaaaagtcaatgccctcaaggaatttatttcctgaaaacttatggctaaggggtgcccagcctgctgattgcttgactcagtgctagatgagagaagagacctcagaatcggacaggctttaaattccagccctgtcctgagtagccgagtggccttgagagagacccagtgagatttccacacccggatacatcgtggaaccatcaaggcacaatgattagcacacccatctgtgcaaatatttatctgtttttgtgagaccatttaaaatcttcttttagctccttgaaaatattcaatgcaagctgggtgcggtggctcatgcctgaaatcccagcactttgggaggccaaggcaggcagatcacttgaggtcaggagtttgagactagcctggcccacttatagtgaaaccccgtctctactaaaaaatacaaaaattagctgggcgtggtgacacacgcctgtagtaccagctacttgggaagctgaggcaggagaatcgtttgaacccaggaggtggaggttgcagtgagcagagattgaaccactgcactccagcctgggcaacagagcgaaactccatctctcaaagaaaaaaaaatattcagtgcttgattctgtcatttgagagaacatggatgaacctaggggatatttttttgtgtaaaatgagccacacacagagaggcaagtaccacatgacctcatctctatgtggaatctaaaatagtcaacctcagagaggtcgagaggagaatggtgggtagtagaagctagaggcagggatgggtccctggtagccggggaaaggggagacattggtccaagttttggttagacaggaggagggagccctggtgacctactgcatagcatggggctctagagggttcttgttctatgagaatcagcctctgacttctttgctggaggggttgtgattcctcaaacaggcctgagtctctgcagtttctcgcttgtggatcttgatctccgagtattcactgtcagtggcctcctgtccctgcgggtcctgaggcttcactttatggaagctgagggttgcataatggagctctccttcctcccctgacgagggggcaacagctgggggaggcttcttcagggggttgccatctttccaggattcagtcaggggtccctggacagagagagagaagggagtcagaacagagcagtggggccaggatgaggcagggagagtccaggaaggaggcccaggaggtccgtcctccattcatcccacctgcatttttgtcgaagtgtctttcatgctttcctccaacatttaacacttactgagcacctgtttggtgtttactaatctcattaacttcccgcaacaactccatagtgagatattattattatctccactttataaatatgaaaactgaggtcgaaacagtcagcactgcgcccaaagtccctgttgcagcaggacccaatccatctgttccttctgaccccaaagcctggagtcctgctgaggcccccgtgtgtgaggccctgagccggtgctggataaactatgatggacatggtaggtgtgggccctgacctcctgcagctcagtttttgttttgttttgttttgttttttggttttttttttgagacagagtctggctctgttgcccaggctggagtgcagtggtgcaatcccagctcactgcaccctccacttcctgggctcaagggatcattccatctcagccccccaagtagctgggactgcaggaactcaccaccatgcctggttaagttttgcatttttttgtagagatgggatctcattatgttgcccaggctggtctcaaactcctgggctcaagcgatcctcctaccttggcctcccaaagtggcagctcagtctttaattgagggaggtggcaacaaatgactgttaaagaaatgaatatcagcttgggtgcggtggctcatgcccctaatcctaacactttgggaggctgaggcgggcggatcacgaggtcaggagttcgagaccagctggccgacatggtgaaaccccgtctctactaaaaatacaaaaattagcctggcttggtggcgcgtgcctgtaatcctggctacttgggaggctgaggcaggagaattgcttgaacctgggaggcagaggttgcagtgagccgagattgccccactgcactccagcctaggtgacagagcaagattctgcctcgagaaaaaaataaaaataagaaatgagtatctacatgtaaattatgatacaacgggcaaaacgagagtaaatgagagagaattacagggccttaattgagacatgatacctgacctggggaagctcacaggttagtggcgtaaggatgacaagccggtcaaagaaatcaggtcccgccaataggaaaaataatgagaggggtcaggatggctggggccagggagaagagatgccagctattcttggggaggaaaaatggaggagagatggtgaatcggggctatagagaagaaaaggaggacagagaggagataactcctactcagtgcctggcctgggaaaaattgggggtagggactgccatgctgtcagcaagatgggggagtcctgtagaagccggcctgtgggaaggaggaggagacgaggaagtgactttggccataccaaagagagcgatcctgggggccatcctgtcagaggtgtccaggctggatgctcggtgtggagaagcccacatcactcacctgagaggccgagcccctgatggcctttgcatcttccatgcctgtatcccccacgcccgctgctggccttgccgatttcttcctgcaggacctcactctgagtgaagagaccagagagcctttcagtgtggtcagatcggggtgcagtgggcagaccaacccctgccctgtatttcctactgggggcttgaggggtgaccgaggcgcaacggcggtggtccagttccagagaccccaacggtgaaaacagaggctcctgcctcatggatggtggggcccgaggttgctacagatgtggagccccacagacaaggacgctcgtgaaatgctcaccgtgcacccgtgagctcattcttgccccaagccctggacccatccaggtccttccagctctggcttcagggattctgttcccggtctgccctgccccaggtctctctctccctccccagggtcaatgctcacatgatgaagatgatgcagaaggacaggaaggccagggctgtggctccagctcccccgactgctgccagtgtcacttgtgatacaggtcttgaggtgcctgcagatggattggagttgctttggggatttatatcacggagaagtgggtctcttcccctcccactgtctgcagggccctagacttccattcccctcttctccttcccagacacagaatacgaatgggagggaggaaaggagactacttctgaggccagtgaggcatgagagtgctggatgcagcttgtcttgcctttatttacaattttgatattgtgttcttgtggaatcattttgcattcaattttagttttttcaaaagatcatggcattgcaatattactttacttgctttctgagttgggtttttctttggcttcttaaatttggtgccaaggcaagtgcctcatgtgcctcatcctagtctaagcactgcaaagcaaggcgcttgtccctccaaacacacctggccgggccccagctcctcccctccaagacccactcctcccctctccccaccccgcacccctttcctggcggggagaggacagtgatgctctgggtcgcagggaagttccaggcctcacagctgagcacagaccagagctgagctcccccttgaagctcaggggcagtgggtggtccatgagggtggggcaggtgtgttctcctcctccagcccctcccttacccacctgtgccctcattctgcagggagaggctcagggaaatgtgctgggagccctgagcgttctgagctcggcaggtgaattccccttcatccctcacgtgcactcgaggcagctccagcagcccagggtttgaggaccgtgaggggcacagggtcaggctcccccgggtccagctcagcctggcagggggattgctgttgacagcacagaccaggcgcagagactggccctcaaggactgaaagagatgagccatttcccagggctgtggatgctgcagagaaagagacagagggtcatcccattactgggtatatacccaaaggattataaatcatgctgctataaagacacatgcacatgtatgtttattgtggcactattcacaatagcaaagacttggaaccagcccaaatgtccaacaatgatagactggattaagaaaatgtggcacatatacaccatggaatactatgcagccacaaaaaatgatgagttcatgtcctttgtagggacatggatgaagctggaaaccatcattctcagcaaactattgcaaggacaaaaaaacaaacaccgcatgttctcactcataagtgggaactgaacaatgagaacacatggacacaggaaggggaacatcacacaccggggactgttgtggggtggggggagggatagcattaggagatatacctaatgctaaatgacaagttactgggggcagcacaccaacatggcacatgtatacatatgtaacaaacctgcacgttgtgcacatgtatcctaaaacttaaagtataataataataataataataaaaggagacagagggtcagagagacaaatggatccagagaaagaggaaggacacagaaagagactagtgagagggactgacacacagacatagactgaagtgcaggaaaacgcacactcagtgctgggaatgtaaacttgtccacttttaattgagaacaacttcactgcatctttcaaaattagaaacaacatacgacactggtatattttgcttttaggaatttatcccatacacttagatattcctgtggaagtagatacaagactatccactgcacagtttctgcggaaggatatttgtgccatgattttccttaagggatgccacaaagtcagagtccatctgtgcagtgaaatcacacacggtcctagaggacggggtggacagtctcactacgatgtcaaaccacctctgagatcctccaggtgcacaaaccaagactcagggcagcctggacggacgctggtcagttccgtggagggggatgggcactggaggacagactttgctgtgcattttgaatttctgcccatgtgactgtatcatctgggcagaagtacttagatcgaaactactgggaaaacagaaagatcagacagaggaagtattcaggagatgcctgacaagaaacttgaaagtctggtcccaaaataaaaacgaacaaaaaccaaaaaaattgggagtctgatccagctgtgtgaatgtcaccctgtccttgctgtggggccaaggaaggggtgtgtggaggagtctaaggggagcagggacaggatggggacaggggctcagatggtcacgcgggctggagatgtgggctcttgtgccctgggctcacgcacagtggcagctctgtttcccaaagtgattccaggatgaggagagacccagccccatcctgagctgaaggccctgctcccccaaccccagggagggggctctgtcctacctgtggcatctccttggaagacagtcatggtcaagttccaaggagggtctgggacagaaagacatgaagacccacattactataaggactggggacattggccctgtcttcccaggagctgcaaatacagggaaaatggagtcggcattctcctgaccccactcccagcccagattctgggacccagaacccagtgtccaggcttgaaccccatcccctgccctcaggaacacctcccaacccatgagggacctgggcatcttggtccagcactcacaggacacatcgaggcggacggtactggtcgtggtcacacctgtcccaggcaaggtcacctgacaggtgaggctggtgccgtggtcctggggctttggggtaagggtgagcactgaggagcgggcagtagtggggcccggggaggacacggaggccccaatccaggagatcatggggggtgtcccctgcttacaggcccagggcacagagcaggtcaggttcctggagtggccagactctagggtccctaggatgaggatgtcaggcctatgggtcagggctggtgaagatggggacacaggatcaggaggaggtatttcaggtgcagccctggaggaagctcaagctctggtccagctcctccccggagaccgacttatttcaatcccaaccccctcccaggccccatcccagccctgcctttcagcccctcatgaccttcccctgtggcctgtgctggagcccgtgccttacctgtcacaaacacagacagctgcttagttttgtaattcaactgtgatttgtaactccatttcatgcttcctctctctagccgaaagaaatatgaccccttatccctcttcctggcgtctctgatgctcagggagcagtcgttgctccaaatgtccccaaggagttggaatcggccctgggtctctgcctgcacttctctgtctgggttgtttgtggccactggagcgtcttggtatggtctgtctcctgcccggaaccagtagccatgaactgggtcagagtcagtccagccatcctgggggtaggagaaggagcagggcacatggacacacaggccctcctgcaccgtcaccagctcctgcacttgcagcaagtaaccatccccatattgtctgtctccctccatcccctttgtcccccagagcaggggcagcagcagcagcagcagcagcatgtctgggtttgaaggcgccagggccgccagggaacgtctgttcctcagggttcttctctcagaaactgaggtctcaagacttaggggaggtcccgcaggaggttgggggtgaagtcagaaaagtgacctcctcagaggaggaacttcacacacagacactgtcagggccgggtcagtcctgggagatccactgtccaccaccccatttccactcctgggaaccctgaggccagagagggtgagaaactcatccagattcccaccctatgcagggcccaacctctttcttgcttcccggacttgcccttccatttgggtaacattttctgcaaggtgaaattgggtcccatctggccagacccctgaatcacccccggggctgtcactgtttgtggaggtcataccagccaaaggtggaactcagggccatgagagactggggtgcaggtgaggtgagcaggcagcctctcctccctctctcagcagcaacgaagtgggcacctcctctttacacaacgaggtcaacagagcagagccagacactgtcctcaaggagtcactgtgcagaggggagacacggaggctcctgacgtctgagctccccaggacgggagcttcagtggggggcacaggcaaggtggggtcgttctcccctaggtcaggggttcagtctcaggaggcctgagcagagggacacggggctgtggaggtgaggattctgcatgttgatacacacgaaggacggggggcggggggaagcctggctcgcaggaggcctgggaaactgaggctgtaactgttgtactgtggggtttggaagggagaaatgtcagaagggaaagggtcaatttgaaaagggcacacacttctccctttgttgcagctatctgggtatcagaatgggtttcttcaccacccgtatcttactcagccacacttcccctggttactgcacagcaggcggggtctgtcagccctggggctttgctcctgcaggctctgcttccaggggtccaggtgaacaggtgtcatggaacgaggacaccagccctggggtgtgcaccttcagcgatgggcaggatttcttgagagaagaaatgtgcacctgaattcaacagatgatgatgatgatgatgatgatgatgatgattattattattattattattattattatttgagacggagtctctctctgtcgccaggctggagtgcagtggcgcgatcccggctcactgcaacctctgactccctggttcaagcgattctcctgcctcagcctcccaagtagctaggattacaggcatacgccaccacatccagctaatttttgtatttttagtagagccggggtttcaccatgtcgaccaggatggtctggatctcctgacctcatgatccacccacctcagcctcccaaagtgctgggattacaggtgtgagccaccgtgcctggcctcaacagattattttaaactgtgtggctgggggctgggaagaagttaagggggatcctgggaggcggagcctccttagactcaggtcaattttcttgaaacattttttggggggtaaatataagaaatatagataaaaacaacccccaaagaagacctcagtgatttacatacaacgagccccctcctagaaatggcacattgacaaagtccccagcgctgctcatttgtttctccttcttattggccacaccccactccctcccaaacgatcccctagcctcactttggtgcaaattgcctcaatgcttttctatatagttttattatctgagcaggctgcatttactaagcttttgcacgtttttctgaagactttgtatacacagaaaatcaaactctactttcttccactcagcttcatggatctgcccgtctcctatcttcccctcattacttataacctggagtagatcattcggctgtgataattgagaagggaaggtgcagggcttgggtgtgcatagccgactcccacccccatcaccaatgcttgcatttgtagctggtatctcattctgcagccatttccccctcctgggcctcctatccttgcccagtagagacagctgcagtatctcaatagtcagaagggccgagccatggcacaggtcttttccatggtccccaagtggtaattgaagccttcagtgaagactcctgtgcaggccttgctctccagcaacttagccaggctggaactacaattcccagaatccccttccctgtttgcttcctggacaaagttcaccacaagggaagggggaagttggagcagcagccctgaggggtccgtgtaggggcaggagctgttgcagctctcacatattgacgctgaccactggcccatctcatagggagacacgatagccgctcacttgttcacctgctggacggcaaggagggcgtgtgggacaccacgggctatgccttagggagcagagaatcattgaatcctgacatggggattggtgacccacatggacacaggtggcccagagagacacatacagtgacaggcaagggatccataaaatggcatcccaaatagttctctcatcctaagacgatgtcccagggtctctttgacctgacaactagcgccattcaccttttcaggggagacccagcttcccagggcaaagggaaggacacagcgcatctcagtacccagaatgcccaatgcttgggtgtgtgtgtgtgtgtgtgtgtgtgtgtgtgtgtgtgtgtgattgagagagagagagagacagagagagagagaccctgtgtgtgagggagagggagtgtctgtgtgtacctgtgtgtttctgtgtatgagctgagcactgcctccttgggcagtgtgacagttaatttgatgtgtcagcttcactgccctgggaacccccattcgtgtgtcctttcataacctcattccttacccttcacatgcacatagagcatttctgtaattacattcacatagatctcccttttctccctaaagaggtctgtccctgcatctcgcctctgtgtgtctctgacgtccagaaagcaggtgctggcctggggtctgaagcaggtggaattggctctgggtctcctcctgctcttttccaactagattgcttccagccacttgaggatcctgatggaaatgtcccctttctgggacagtagccttggacagggctggagtcagacaggtacccacaggggtggaagatggagcagtgcgtagtcacagaaaccctcctgcacctgcaccaactctggggcttcctgccgggatctcatatcctgagccagatcccctgtggggaaatgagggtcagcccagcccagccccatggttcctctccctgaggcccattctcctgcccacagcaggggcagcagctattgcagcgtgagcttctttagggtgagccttggtgtcgcagggccctagaagggccccacaggaagcctgggggtaagatcagaaaaataactgaccacaaaagaggaccttggccccgacactgccagagctgtcagggctcctggggagtggccatttctactctccggatgggtcttcagtgtgggccacacacagcagggaggccccgacccacagctgcaggctctctgcccacagcctttccctcccacagcactgtccacaccagggaagcaggcactgcctgtccattacagcttctaggtgctcgggagggtcagtcctgccagagctgggactcaggaggggctggcggaggaaccacgaggcatgagagatggggaggggtcccccgaggcgggagaggtgatgtttaatgaatgagcacaatcaccacatcaggagcatctcctcctttcagggggatggaggcaaaggggagagtgtgacagactctgtctccttccttgggaagttccctaatgaacgagggggcagaggagccctgggccaccccagctcctgttagtaagggctgtgatgcttgaaacacaggcagggcttgtggaaccccgagggccctgtgcagctagaaggtgcggtctcaggtatactcgggcagagtggacgggaccaggactctgaggtgctgtgagcatgcggccccacaggtggtccccagccttcctaaccttctcagtgccccctgcccagcatgcctggtggtgactgcacagccgaggccctgtgagcccagcatggggagcaaggctgagcccaagatgctaggggaggccctggctctggagtgtgagggtcctgggccctctccctccaagtctcagtctcctcatctgtcccctggagggatcacagcacccacccctcagcctgagggagaacccagctcgaggaggcgacgttctctgcagactcaggcatggccaacatgctctgtgtccctgggcaggcccgaagcatccacgtgtctggccctaaccattctcaggggtcactcggagtcctgccctcagtaaggagctcctggtggtccacactgctctggggcttcctcagctgaggcctcacagagagagttcaggggtacaggctctgtagctggatggctgctggcttgagctgggctctgtaaaacccacggtgctgtcttgggagggggcttacctgcactgtgcatcgtcggatgtcaacacttacggggtgtcagggatgaactgtgtcccctacaaattcctatgctgaagtcctaacccccagcacctcagaaagtgaccatatttggagacgaggacttataaaaaggtgactaagttaaaatgaagttgttagctctcatcctacatgagctgtgtctttattagaaggggtgattaggggtggagtgtggtggctcaggcctgtaatcccagcacttccggagaccgacacgggcagatgacttgaggtcaggagttggagaccagcttgaccagcatggtgaaaccccgtctctactaaaaatacaaaaattatccagacgtggtggcatgtgcctgtaatcccagctactccagatgctgaggcggaagaattgcttgaacccgggagacggtggctgccgtgagccaaaatggtgccactgcactccagcctgggcgacagagtgaggctctgtctcaaaaaaaaaaaaaaaaaaaaaaaaaaggtgtgattaggacagcgacatactcgggagaaagaccacgtgggacacagggagaagatgccacccgcaagccaccgagaggcctcagaaggaagcaacgctgaccacagcttggtctcagacttccagcctccagaagggtgggaaaacaaaggcgttggtgaagccactcggtctgtgttcctttctcaaggcggccctggcaagagagtccatggagtggtcgagaggattcgatgtgttcctgtgagcacagcccggtgtggaccgcggtggatgcagagtcccacaggggtctgggacagcctgtaacatgggatgctcagaggatggaaggagaaaagggaagggaagggctcctcaccagaggaaacctgtgctgctgccgccctgtctctgacatctgcagggctgccccctccacccacactctccctccctccccaggaccgggcagggctctcagccgcagcccctcgctgcccctgcaccctgggcagttgcctcccatctatggggcggagccgcctgggcgtctgggctgggcgaggcggagcctggaggggcaccggccacgggcaggggagacagaggcgggcacagcctggcggggtccgggctgagccagcggggaggacggggctgtgggagcccagcggagagggtgaggatccgcgggcaggtgggacaggtgagctgggaggtgagagatgggcagggctgcctgaaaggcaagttcatcccagagcagcgagcagggcgcagccaaaggccgtgggggaaacagcggcgagaaaaaaacggccaaaattctgcccgcagtgcgcctgtatcctagtgcggcggccacaaaaatattgttgagtagcaagaagtgtttcgaaagtgtgcagtgggtaaagtgtgagaaaataaagccgatttcatcgagaaaaagagagacagagagagaaagggcccatatcaacccaaagtcattactcttcatcacgattatattgcatttttcccatctactacagcgttaacttcatataaactttatgaagacataccttacgtataataaaaagcacacattgtaagcatacagttaaattagttttggcaaatgtaaacaccctgtaactatgtcctcaatcaagatagggaatctttttttcatccctccaagctttcttattttctttcttttctttttttttttttttttttttttgagacggagtctcgctctgtcgcccaggctggagtgcagtggcgcgatctcggctcactgccagctctgcctcccgggttcacgccattctcctgcctcagcctcccgagtagctgggactacaggcgcccgccaccacgcctggctaatttttgtattttttagtagagacggggtttcaccttgttagccaggatggtctcgatctcctgacctcgtgatccacccgcctcggcctcccaaagtggtgggattacaggcgtgagccaccgcgcctggcgctttcttattttctatcccagtcagtgtttcacttgcagccatcacttacgtgattctcatcactatctattagttttttctattctggagcttcatataaattgactcacacaatatttatgtatctggcttctatcagtttgttaaagacgtgtatacgttaaatgtatatgcacccaataacagagcatcgtttatcaaaatgtcaagtatcttacctgactatagttgaaaacaactcaaaaccagtaacaagaggaacattagaaactacacaaatatattaaaattaaacgacatgcttctgaacaaccaatgagtgaagaacaaagctaaaattgaaatttaaaaattcattgaacaaattaaaatagaaacacaacatgccaaaaactataggacagagaaaattaagtattaagaggtaagtttatagcaataaatgtttacaggaaagactagaaagatttcaaataaacaacaatgcatctcaagaaactagaaaagcaagaacaaagcaaacccaaaattagtagaaaaaaagaaataatagggccgggcgcggtggctcatgcctgtaatcccagcactttgggaggctgaggagggtagatcacctgaggtcgggagtttgagaccagcctgaccaacttggagaaaccccacctctactaaaaatacagaattagctgggtgtggtggcgcatacctgtaatcccaactactcgggagactgaggcaggagaattgcttaaacccaggaggcagaggttgcggtgagccaagattgcaccatgacactttagcctgggcaacaagagcaaaactctgtctcacaaaaaaaaaaaaaaagaaaagaaagaaagaaataataaagaacagagcacaaatcaaattgagacaaaataatacaaaagatcaacaaaacacgaagttggattttttaaaaggtaaacaaaaccaacaagccatcagctagagtaactaggaaaaaaagagggaagacgaaaataaataaaatcagaaatgaaaaagatgtcacaacggataccacagaaatacaaaagatcatgaaagaatatatgaactatatgccaataaatttgaagacctagaagaaactgataaattcctcgacatatagaatctgctaagattgaaacaggaagaaacagaaaacctgaacatatcaatgacatgcaacaagattgaatcagtaataaacctcccaacaaagaaagaacaggactagatggcttccctgctgatttctagtgaacatttaaagaattaacataaattcttctcaaaatgttcaagaaaaattgaagcagagggaacttgtcctatatccttctgtgaggccagcataatcctgataccaaaaatagacaaggacacaacacaaaagaaaaactacgggcaaataaccctgataaatatagacatagaaatctccaaaaaaatactaacaaaccaaatccagcaaaacaccaaaaagataatgtaccataatcaaatgggatttatcccaggaatgttaaggatggttcaacatatgtaaatcaataaacatgatacattatgtcaacagaatgaaggacgaaacctataagatcatctcaattgttgtagaaaatgggtctgataaaattcaacattctttcatgataaaatctctcaataaattagttatgaaagtaaagtaactcaaccccaaaaagaccacatagaaaaacccatagctaacatcatagtaaatggagtagtgtaggaagcttttcctctaagaagtggaacaagacaaatatatccactctcaccactcttattcaacatagtactgaaagttccagccagtgcaattacacaagaggaaaaacaaaaaccaaaacaacaaggatcatccggatttggaaggaggaagtcaaattgtctctgtttgcagataaacatgatcttacctatagaaaaacctaaagactaccaaaaaactcttagcattgataaacgaattcagcaaatttgcaggatacaaaatcaacatacaaaaatgagtagtgttgctatacgccaacaaaaaattagctaataaagaaatcaagaaagcatcccatttacaatacctataagcaatgaaatacttaggaacatgtttaatcaaagaggtgaacgagctctgcaaggaaagctacaaaacactgatggaagaaactgagcaggatacaaacaaatggagtagaattaatattgttaaaatgaccatgccattcaaagtaatctacagattcaatgtgatctctatgaaaatatcaatgacattcttcacagaaatagaaaaaagtcttaaaatttgtatggaactgcaaaagacctgaatatccaaagcaatcctgagcaaaaagaacaaagctggaggcatcacacgatcagacttcaaaatataccacaaagctgtggcaacccagacgcatgatactggcataaaaaccagtacacaggcaaatggaacataatagagaacccataaattaattcatgttatccactgccaactgatttttacaaaaatgccaagaacactcattagggaaaggacggtttcttcaatatggtgctgggaaaattacccatacgcaaaagaatgaaactacatctccacctttcaccctacatacaaatcagctcataatggatcaaatagctaaattaaagaacccaaactctaaaactactgtaagaaaacacaggggcaatgcttcaggtcatttgtctaggaaaagattttataaataagaccgcaaaagcacaggtaacaaaagcaaaaataaacaaatgacattctgtcaaactacaacacttctgcacagcgaaggaatcaatcaacggagtgaaaaggcaacctacaaaatgggagaaaatatttgcaaactattcatctgtcaggggattaatatccaaactatacaaggaactcaaacacctcaacagccaaaacccccctacaaacaatccagtaacagctgcatgtagagaggtgccctcctatctgatctatctcctagggagacactagttgtcaggttttgtggaacctcttggacaggaagagaggacttccttcagttggaggtggggaggagataagggtaagcatttcctcctactcctcctagaagccgaaggcatgcagaagggacagggcttgtgtccttcctgttcccctgctcagccagtcctccaggatatcaagtgtcctcagctccagctgtcctgtccccaccacaccctcaggaacccaggcatcctggcccagcactcataggagacattgagctggatggttctctctgcagtcacaccagctctgagaaacttcacctgacaggtcaggttggtgccatggtcctggagccttgaggtgattgtgaacgccaaggaatgggtggtcctggggctcagagaagtgggggcagctgacatccaggaaatgataagggggtgtctcctgcttataggcccagcgcacagatcaggtcaggtttcagaggtggctggactctagggtctccaggatgagaatgttgggtatatgagtcagggttagtgaggagatggggggcatgcaggatcaaaagggtaggtccaaggtgaagccctgggggaagctcaggctctggtctagctcctcccccaaacccccggcatgctttatgcccaactccctcccaggacagggaccccatcccagccctaccctgccctgcagcccctttgactttcccctgtggtcagtcctggagctggtttcttaccagtcacacacaaagagaactggggagattataacctgtatttggtacttcctctctccacctgaaagaaatgtgaaccattgttcacctccttctggcatctatgatactctgggagcagttgttcctctggggattcctgaagaggcagaaaaggcccagggtctcctccttcatttttcaatttgggttgtttgtgggctctgaagtgtcccagaattccttgcctccttcccggaaccagtagtcatgaacagagttattcgtgtagtagggtggagataggagaatgagcaaggcatgagggtgcacagacactcctgtacagtcacagactcctgcacttccagctagaaaactgcatcctgagccagggctccagtggagaaacgagggtcagctcagttcagccccagagtccctctccccatggcccactcacctatccactgcaggggcagcagcgtctcttaggcagagggttcctggactccctgtgtaatgagagaaggggaagggattggaggggaaggtttgagggcccattggaggctgaggagaagcaggaggacttggcggttcacagaagaaaaacctcagacctacacgtggtcagagctcatcccctctgcacagagcagagggagactccagagacctccccagaggggagcaaataaggagcagagatcttatatttcctctcatctgagagcttccctccaccaccagagcctggactaggatctctggggacatctgaggcatgggacactcatgagggtctaaggttctcccaccctgaggtgcttttttgtgcaccaccgtttatacctgggaacatgtcactcctggtctggtcccagagagtcacaacctcatctagagtcatgaggaagtcagtcctgcaggatggaggattctgtaggttctgtgggagtgtctgggacagtgaaaagaagaagggtcctgggtgcagtgtgggtggtagccattcactcattcatacattcattcattcaccaaacacacagtgagcatctgtgtgtcagtggggctggagaaaagatgccagggacctggtccccacccttgagatggcccccacccatagcctcatgtcctcaccatacacacacacacacacacacacacacacactggctttagagctgtggacactggtgaatttgccgtatgtcatggtagaattctaggtggttttttttgagactgagtctcgctctgtcgctcatgctggagtgcagtggtgcaatcttagctcactgcaacctctgcctcctgggttcaagtgattctcctgcctcagcctcctgagtagctcctgagtagctgggattacaggtgtctgccaccacacccagctaatttttgtatttttttttaagtagaaatggggtttcaccatgttggtcaggctcgtctcgaactcctgacctcatgatccacctgcctcggcctaccaaagtgctgggaccacaggcatgagccaccacgcccggccaatactaggtattttaaaaaaacttgagtactgaatttttttccctgacaactggtatgctgatttacaaaatttgaatgacatcttcagaataagaaccatgcaggatcttcttgtaaaccaaaaggaaggacacatattctatggactgcagtgcagaagaaacttcttttccatggatgttgccattctgtgtagtgtggacagaagtgatttatttgaggtcctcttcatagagattagcatttcctttcatgtaaaaatatgctgctcacagttaaatgaggctcataagacataatattttcagacaacatgagtatacagacaaaattaaaattttaggttccatttttcatgtttatggctatttgtatttttcttttcttttttctttacttttttttttttttttttttttgagatgaagttttgctcttgttgcccaggctggagtgcaatggcacgatctcggctcaccacaacctctgcatcccaggttcaagcaattctcctgcctcagcctcctgagtagctgggattacaagcatgcgccaccatgcctggctaattttgtatttttagtagagacagggtttctccatgttggtcaggctggtctcgaactcccgacctcaggtgatccgcccacctcgtcctcccaaagtgctaggactacaggtgtgagccaccgcgtccggtctctatttttctttcatgagttgcttgtttgggcattgacatgcatttataattgtcttgttggaatttagtttttctggtgtttcctaatcctcttcctccctcttgtctatgaagagtctcagacaatgtggtcatgctgttctcttatctgaggatttggaaatttgcctcgctaaatcatatgacacatatctgactatacccgggtgtgaccttcctgacagtcacacagttaaatgtcctggccaatacctttaagtttcaaaataaataaataaataaaaatcaaaataaaaaacttaatggataaaaagcaattttaggttcagctacgtgattttccatctcactctgtatcgtatgcatccaacgaactcttgaaatctaggacataatactatttggcaccatatattagtaaaatatttattacagtattatctagataaatgctcatttgtccttattaacatggagagctatttgtatcttcacttactatataaataattgaggttttaataagtaatataataccttgttgtaagttattttaaagttaagaatatggcttggattccttggattcattcactcggtgtaatgcatttgagactcagctatgtgattgggtatatatatgaataatttgtttttgtttttaaattgctgactcatacttcattgttttccacagatcccccattttgtatatattcactgtttgacagatactcagaatgtttccaggttttggtgaatataatataaagctagtacaaatattcccatgcagatttctgtgtgtggacactagtttttttttctcttgcataaatacctaggagttgggtgcttagtcacatgtgtaagttataagaaatcgcagctgggtgcggtggctcacgcctgtaatcccagaactttgggaggctgaggcgggtggatcatttgaggtcaggagttcaagaccagcctggccaacatggcgagaccccatctctactaaaaatacaaaaattagctaggtgtggtgggtgcctgctatcccagctactcaggagactgaggcaggtgaatcgcttgaaactgggagacggaggctgcagtgagccgagatcgtgccactgcacttcagcctgggcgacacagtgagactctgtctaaaaaaagaaaaagaaaaagaaattgtcaaagtgttctccaaagtgtgagtgccacttcatatccccaccagcaaaacatgtgagttctggttgctctacattctcattaatatttggtattatcaggaatgtgtaaaatttatttttcttttggtttggttttgtagccattctaataggtatgtactgccacctcattctagttctaatccacgatttcataagagcaaatggcgttgggaatgtttccattcatgtgattatttgccatgagtttttcttctttgatgaggaggctgatcaaatctttagtgctttttaaaatccgtcttaaaatacacataacaaaaattaccattttaatcatttttcagtgcacaggtaagtggcattaagtactttcacactcttatgcaattatcaaccattgatctccagaaatgtcttcatcttgccaaattgaaactctgtacccactgaaagataactccctattccgtcctgctcccagcccacggcagccaactttctactttctgtctatgaatttgcctattctagatacctcctataagtggaatcatacagtattggtaacttttgtgactggctaatttcatgtggcatagtgtctccaagcttcatctaagttgcaacacgtgtcagaatctccttctttttaaggtatttcattgtatgtatataatatagaggcttttgaccagtgtagctcatcctgaattatcgagttgatccttaaatccaatcagaagtgtcttgctgggagaggaacagatggagatttgatgtacacagaaggcggcggtgtctgggcaaacccatcacctcaaatgcatctcaccaccagggggagccatagagttgtgcgatgcatccaccctaatctttgtacaacctcctgtggataggagtaagaagtggatagagagggtgagaggcaggagcctccagtcagcttccaaagatgggagtgagatggaaaataacaagaatgacattaacaataacaataacattacaaataacattaagttataacagctacctcttgtggcaaaaaccagagtagggggctgtgagaaacccaccttatgtacagcgcctcagagatcccaacttaacattttttgtgatctccaagatagatagacaggaaggagtggctgttcattagcattcgctctggctgtgccaggcagaactttgccctgggagggactatgacgttctgctctcttaataaaaaggtacaaagctgggctccagaaatagactgaggggcctcttgggtctgctccccaggctgcttcctgtccataggtgagcagtggatgctgccactcctgactggagagacagggtttcagaagaaattctccaagttatgggggatcccggatgggatgggtcaggtctagctctggggtctgcttaagggaatgagagtgagtctttgaagctcaaggcaccctccaaacctgcactcctctcctaacagcagggtcctcatgagggtgtcgttgcatgagacagtaagggtcatgccatgggctctgaatgaaaccagttctgccatcttcatcctgattgttcagactaggcatcactgaccatgcacagtctagatggagggaggtacatgtttcttcagggacatggcacaatgctgtgtctaaaaggaatgcttcatgttggtgcagccaaatggagctgatcggacgctctctgtggctgtggttgctggtctcctctcagtatccactctctctttttccttagtaataaggacctcagacatgagaacccagctaagaaggattctacgttctacactttcttctgtagttttttctgaacagccctatgaagaggaaacattttacatccctattaaaaacaatttctttttctttttaatttttgtgggtacatagtagttgtagaccctaagattcttttaaatttatttaaattttttatttcttaacctttattttaggttcggggtacacgtgcagatttgttatataggtaaacttgtgtcatggaagttttttgtacagattatttcattacccaggtactatgcctagtacccaatagctattttttctgctcctctccctcctcttactgtccaccctcaaggaggccccagtgtctgatgttcccctctatgtgtccaagtgttctcctcttttaactgccacttataagtgagaacatgcggcattggttttctgtttctgtgttaattttctaaggtaatgtccccattttacaggtgtagaaagcaaagcttagcggagataggaaacttaactgagatcacgtggcaggtaagtggcagcattaggttcaaaccagacagtgtgaccaggaatcccccctcttaaccatggtctttcctcaaacagcctgtacagcctttgacccagcagtcctcagtaatttgggggcagtgcacaagaccatcctcacttctaactccagcttcacactcaggggtcccctgatcaccttcagtttcgacagttcacaagtaggactcacagaactcactgaaagctcttattctcatgttatgtctcattacagcaaaaggatacagattaaagtcagccaaggggagaagagcatggggcagggtccagtgaattccaaatgtgtagtttccagttgtcccctcccagtacaatcacagacagcagtaattcctccttacatgacgtgtgacaacatgcatagagtgtcaccaaccagggacactcacctaagccttgatgcccagggtttttattgtggctttgccatgtagatatggatggctgttcacatggctgatcttagcttcagctgctctagagatagagctgacaacagtgacccaaagtccctaccattagtcatattattagactatttggtggtcatattattagacgaatataactatttagtcatattattatgaatattagtcatattattgggcaaggcactaaggtaaataaagacattcctatcaggtgagatattccaggggcttagagttccctcccagtagctgagagcaaagtccagacctctatttaagtagggttgagttctttcctgtgcaagttcacctctgggattaatcacggatctacaaatgggactaggcaaaagctgttcatgctgctgtgtacaaaaaaaagtgggccaggcatggtggctcacgcctgtaatcccagcactttgggaggccaaggtgggtggatcacgaggtcagagattgagaccattctgaacaacatggggaaaccccatctctactaaaacacaaagaattagccaggcgtggtggtgtgtgcctgtagtcccagctacttgggagggtgagacaggggaatcgcttgaacctgggaggtggaggttgagtgagccgagattgtgccactgcactccagcctggcgacagaggaagactctatctcaaaaaaaaaaaaaaaaaaaaaaagaactctaatataaactgtgggctttgggtgctaatattgcgtcaacgtgagctcatcaaatgcaatgaatgtaccactgtggtggggctgttgataatgggggtggctgtgcatgcgggagggcaggtgatatatgaaaaacctctgtaccttcctctgaattttgctgtaaacctaaaactgctctaaaatatcgtgttttttaattgaaagaacccggcctggcccagtggctcatgcctgtaatcccaacacttgggatgccaagggggatggatcacttgaacccaggagttgaagaccagcctggccaacatggcaaaatcccgtctctactaaaaatacaaaaaatattagcccgatgtgatggcacatgcctgtaatcccagctactctggaggctgaggcatgagaatcacttgaactcaggaggcagaggttgcagtgagcctggatcacactactgacctccagcctggaggacagagtgagactctgtctggaaaaaaaaaaacaaaacttaaaggacataaatgattgcaaatagaggattggttgaataactcaacccatatccaatccagtggaatactacacagccatgaataatgaacagtgatggtgcaaagccatgcttctcccatgagagtccaggacctgaggcagaatgtggggagtgcttcaagggagctaaagccagaagatccactttgtatatatttcagaggcaccatttacacggtaatactggggcaggccaattaactaacatcagtggtaacgaatgcgttattttcctattaaaactaacatggaggtgtctggctgtaggctgcaaatattcatatgggttttcagggcacagaagacttcaaagatattttctaaaccagtagacatccagaggtgcatattcaccttactctgacaaaacttgggtttaacatttgaaaagccctaataaaaacaaaaatttaatgatataattctgctctaataaaagagattcatatgtgcatgcgtatgccagctataacatacccaaactgaaaagacacatagaaaacagctggttgtatctctgggtggttttaaaaaacggtattctttaaatgacaataaataattttatatttattttacatacttatatagttatacatataaaatatatgtataaatatgtaaatgttaataatattacataaatatgtaagtatgtaaatcaaaaatttttataataaattcaaattcactccttttataatttaaaaagtagggtgtgttatcaaaatgaaagacaaacacattcccaagtacggttagaaagaccttgtcaattggacatttctgagttgttctttccctctctctctctctctctctctgtttctgtgtcttccctctgtatctcactctgcctgcatttttttttatgtccctgtctgtctgtctctctgtcaggtttcaaggggcccatacctcattacttctgtgcacaactcccctgtcctggatccctgtttttagaaacagcctgaccctccaacaacaaagtgtcaacctaaataacaaacagagagaagctctctaaaagaaaatgatatgtattcaggaatggggcattgcaatgggaatctgggtgctatagtaaactacgtgcatattcagggaggtaaaagaacacaaagggttttcaatggaaaaatgaggaggaccccataaatggtttgagataattaccctaggctacaaggatccctaatgagggtgacgtcagtccaagtttggaccggaggttgctgtccaaatacttgtcacagaagtatttttttggtggaaggaagcaatggcttttgtgcaagactatggtttctgcagcgtcttctgtgaaaatttttgttgtcagagagccctcgcttcacagccttccccactgtatttctcagggatttttttggcttgtgagcactttcacaaagggatctggttatacacacactggttcaggtctagaagagcattccctgcagccattcacaatggtcatgggaggaatatttagtgacatagagaaatagtccactgttgaggaggaaagcagccagttgtaaaacagccccaggcagtctaaaagttgggccctacaccgggcacggtggctcacacctgtaatctcagcactttgggaggccgaggtgggcggataacgaggtcaagagatcaagaccatcctggccagcatgatgtaaccccgtctctactaaaaacacaaaaattagctgggtgtggtggcacgagcctgtagtcccagctactcgggaggctgaggcaggtgaatcacttggacccggaagacgaggttgcggtgagccaagatcatgccattgcactccagcctggtgacagagcgagactccgtgaaaaaaaaaaaaaaaaaaaaaaagctgggccctgcataggaaaaccaaaccaaatggaaacaggacatacagttgaggagtttgatgtcctatctttgaggcacttggctgtattttctggttttctttgttttcccaacagtgagcctgtgtttttccgttttttcatgaccagagaaaaaaatgtaaattattataaaaataagtaaataaataatgaactaaaggcaacataaagccataaagataaggttgggctctcaagagccgtcttccccaggccccacccctgctggtcagagtgcaccctggggaggaaaggccgccctgaaggctgggagacgagaccggcagcctctgtgccaggagacacaggtcttggagggagcagaggaggtggctgtgtctctggagggacccctcctcctggaggaccccaggcagctcatggacctttccagacccagatggagcctgtggaggagggtcttcctcatgggtaagagatgctggatgctggatgagcttcccaggactgagggaagggcagctaggagcaaagcggcggggagggggctgggaccatccccatccacgggcacatcaagaaactcccagagcaggggtcggggagaggagaagggggaggaccctcagcacaactttcatgagctcacacacgtgggcacactttgcccctagacacacccctgcacagacccacacatgtggtgttacacacacacgcacacgcacatgcacacacacacacgcgcgcacacacagagagagagagagagaaactgtgtttctatctacgcccaggaatcaggagcttggaccttcaccctcacctccctgcactcacctcccactgggtgccccaatctgccccatcccctcccccacctctcaggccagattccttcccagcccctcacctttgcccaggaccttctgtgccccctacaagcacaactgtcctgctttaccacgtgtactgtccttgaacaggtccagtgtgtccatacgtgaggcctagagccggggtctcaggcatctctgcctcctccacatagcccaggcttggggttcacagggcagtggacaactgcccatgtcatatgtggtaacaggctgccgcctccattcacacccactccagtgaatttagatgcaaaatcaaagacatgtagaaattctcgggggagtatttctcacccagacaatcattactgaactccccctgtgtccagcctgtgctcaggggcgctggggactcagtggtgactgagacagggcagtcctgccctcctggagcccacagtccagggcgagatatagatatgtgcccagactctgaggacccccagaggtcatggctgggatggggggagcccaggaggagctgggggagcccagaggggacacctgacccaggctggggtggaggagacatccaagctgagacctgagtgatgaatagaagtgagtcagcaaggagggtgcagatggagaggagggagaaggagtccctgccgggaatggggaacagcgtgtgcgaagcctggagttaggagaaggtgtggtgcaccaagagagctatgtagaggcctggggcatacagcgtggcagtcatgtcttctgataaataactacaggaataaatgagtaaaaggtgcatagtggggacaggatggggtaggtgtgcaccacaaggaggctcgatgagtcacaaacaccagctctggctgagagtgtttcatatacccacctaagagtttggactgtatcctaagagcactggggagccatggaaggtgtttgagcagaggagaacagggtcgcaacttgggcttattaacatttacgtaactgtgatgtgaggatggattggaggctgtgtggctagcgaggagggcctgggagaagataagggtaaaatggaccacggcaggggctgaggggaggcacaggaggggacaagctggggactctaccaggagccagaaactcttgcctggttcaccagcgtctctgggaatcgttcccggatggtgtcttttttccttgtcttctcagccagtctgaatctctttgtgaatttctctctgtcttttttccttgtcttcttcagccagtctgctggcctgtgggatctgccaggcctctggccaaatcttcatcacccaaaccctggggatcaagggatatcggactgtcgtggccctggataaggtccctgaggatgttcaggaatacagctggtactggggtgcaaacgacagcgcaggaaacatgattatcagccacaaaccgcccagtgcccagcagcctgggcccatgtacactggcagggagagagtgaacagagaaggcagcctgttgatcaggccgactgcattaaatgacacgggaaactacactgttcgggtggttgcaggcaatgagacccaaagagcaaccggctggctggaggttctaggtgggttagcaggtgctgtgtttcccaacccccaaggagagctagatgtgacacatttgagagaaggacattatacagagcatgacaccgggagtggaaatcacggagccgccctggaatcttgtgtaccatggacagctcctgggggatctgagggctagtgggaggagagggcggagttggaagacaagcagtcctgtatttgacagtggctgcaaatacatactgcaggaccctggcccatttgtgttccttctgtgttcttcagtttcctcatctgtagagtggggaggaacccaccattgtggtttgtcgtagcgttggagggagtattcgtaaagtgaatgggactcaaataatggagtagtattgtgtagccaaatgccacctctcactcagaacctctcgtgtctcctggatgagggtcctggtttggaggatcagaaacaatgattaggccacatgtttatgccaagagctcaccattatggcagcagacagcacggcagtggctcaggcaaggcccacacctcagcagcctcattgccctgtgcctattcctctgcccttctcagctcccttgccaggatgccagatcttatcttacagctcttggcttctctccaacatgcccagaagtcccctggagaggagcagagcttggggaagcagaccccacttgtaatttttttctctttcctgcttcacccagagttgggaagcaatctgggcatctccgtcaatgccagctccctggtggagaacatggattctgtggctgctgactgcctcacaaatgtcaccaacatcacgtggtatgtgaatgatgtgcctacctctagtagtgaccggatgacaatttccccagacggcaagaccctcgtcatcctcagggtcagccgctatgacagaacaattcagtgcatgatagagagtttcccagagatctttcagagaagtgaacgcatctctctgactgtggcctgtgagtggtctgggctcctgggactgaagccagggctggtctcagggctttctagggataggaatatgttaggacaggctgagctggagagagggggcatcctgggccagcctgcagccagctcactctggattggaatcagctcaggctcttgagccctgtgaacttgggagctgcccctgctactcagaaacgtggtacactcgagtttgaaatgaagacgccagtccccacttctcagattagaaatggtcagtgtgcctttgttgaggtctgcttttgtgtaaagaggggactactgaataccattgtttcttaaattgatgttcaattattaagttttcaagccccttgagccttgaaattctgctcattaatttctttcttcttttctactaaatttagtatagtccctgtcactctctttcactgaaactgaacaggctatgctcccttaaacagagagctttatttaaagactcaattatgcattccatacattcttttttttttatagccttttagctgcctaccggggcaagttcaccacccaggaagacctccacaaattctcagacagctcttggaaatcgaatacgctgaacttataaatacattaacacttagatttttccccagtattccaggactgctcacagagtttaataaactcttccacatcttccaactgaaaaccataatcacacatctaaaatcactttcacgtctcctggaactactccagcggtctgtcagatttcctaaagcgcaggctacggcacccatcctgtggaaggtggggttgaggggtgaacaatttctgacctccatacagctgtttacaggtcagaggcttggaaccaagacccaggatccagaggctgcagctgctcagggcagttgctcccaggccctgagactggctcaatccttctgtgtcagttggagtcataaagtcctaatcctctcctccgagcctcattgttttccatctataaaatggatcaatggtggaaccagtcacatgggttgttctgggaattcaacaaatgtggggacaggcacagagcttagaacagtgcctggcacacagtaggccccatgtgttggcttttactccactaattttattacaatgtaaatggcaccatgggcctggcctctagtagttccttaatcatagaagatgctcttatggttattgttgttgacacagctgccttgcctggggcaggtctaggggttagcccgaggtgcacaatggggaacctcctggctgggggaggacttcatgagacgggacgccgaggggtcagaaacatagcctgggcctcctaccctgtctctacagatgggcccgactatgtgctgctgaggagcaatcctgatgatttcaacggcattgtgacagctgagatcggctcccaagtggaaatggagtgtatctgctattccttcctggatctcaagtaccactggatccacaatggctccctcctgaacttctcagatgcaaagatgaacctctcgagtcttgcctgggagcagatgggccgttaccgatgcactgtggagaaccccgtgacacagctgatcatgtacatggacgtcaggatccaggccccccatgagtgcagcagctcccctccaggctcatgctttgcacatctccctgcctccatgccctgctaggcagtgcccaccctcaggagtgccacctccactgtgccatgacatgctctcaacctctgggtgaaatctcccagttctctgaggtctgggtccaaagctgcctcctctgtgaatcctctggagtcctcagatcagagtcagggtgactcccagggggataagagtagcagacattggctgagcacttactatgtgcccgcctttgttctaacctgtgtgactctcaccatttctctggagtaagtgaatgcgattggcatcacctccatttgacaggtgagaaactgagccccatggagtttgagtgcttattcaaggctctattgctttgtaacccatggaagaggtggcattcaagcccaggcaggcatagcctacaccctcaactgctcccttcagctgcttcaagatgaggaattagaaagacgcagggacgggatgggtggacggggagtagagatttggcatggccatggcgtcagaaacttggcttgggagtgaatttgtaaatggggaaagcatcttcttagcaaccatgcgtccaatcttctgcatcaaggagagagactgatgtgctcagggagactgcagaggagtgcagcaggtaaatgcaggggctctacagcccaaggttcttggtccaaatccccattctgctgctgcctatctccatgaacctgggacaagcagctccatcgttccgagactcagtttcctcaactgtaatgaaaggataagaatccctgcagggaaagggtgctgtgagaataaaatgaaactgtgcaagaaagtacagaagacattacaggatgtggtctccagactttacttcagccacactacctcctaagcacctactatgcaccagacacgatgtgtgcatgcagccctccaagtcatcgattcacatttttctcttcccctggactacaagattcaggagggcagaagctggggaagctttttttttttttttaacagagtctcgctctgttgcccaggctggatgcagtggtgcaatctctgctcactgcaacctgcacctcccggactcaagtgattctcctgcctcagcctcttgagtagctgggattacaggcacacgccactgtgcccagctaatttttgtatttttacaaaatagagtagagatggggtttcaccatgttgcccaggctggtcttgaactcttgacctcaggtgatccaccttgggcgagctttctgttttccatttgtcctcagtgcttggcacagtgtgtagcacatagttggtgctcagtgaacatttatgcaatgagttaatgaccctgtgtcacacaccccccttccagtcactgtctctccccttatgagggtttattcttctctattcacttatggttgcttgcagtgtgagacatctctttgcttaattgtccactgtccacttcccagctagaatgtcaggcccatgggtacagggagtttgttttgttggctgctgaatccctcgtacctggaacagtgctttgctgataatagatgttgacaaatctttgaagaatggatatgtgggtgggtgaagagatgagtgaatgcatgaatgggtcaatcgtggtcctgacccccaggtgtcctcttccttcagggatcttacctgttgtccacagagatttctccatctcaggatccatggtgatgttcctcatcatgctgacagtgctgggtggcgtttacatctgtggagtcctgatccatgctctgatcaaccactactcaatcaggtgccctcattgctctgggacaagggtgggatgttggctgggggctgggactcaggagccagccctccctccagaggggaagcagagccagaaggggagggataagccaggaactaggttgtcagggatcatctggggcagacagatcagcccccaggacctgaagctgatgggagcaagagagggtttagagtcggccatggttctaaatagctgtggggtttcttctagcaacttcccttctctttgtgtttataagggatattaaggtttacctagagggacaggtaaaaaaatgagaggtctgcatgtcaattcctggtacatagtcatcctttgctaccaagtgaagttggggaaacaggtatcagcggtgaactatgcagggagaagagattgggcagtgggatggttaaggtctgggttcaaaccccagctctgctacctgtaggctaggttaccttgggtaggtcacttctcctcatagctcatcctcagcccagctgaagaatgaacggagcaacaactgcctgaagggtgatgtggggattagagacacgtcttggaggaaaaggggacttgcagcattctcagcatagagtagaccagagtttctcaacctcagcactatcagcattgggaccataattctctgatggggaagaggaggtagtaaggctgtcctgtgcattgtgggacatttagccgcataactggcctttttccattagatgctagtggtaacaaccaccaccaccccagttcagaaaaccaaaaatgtctctagacactatgaagatcacatgggaggcaactttgccctggttgagagtcagtggagtagatgttagaaagtgcagtgatgcttgggaggatgatgacgttaatgatggagataatggtaccaatggtgatggtggtgattatagtgggaatggcaatgatgatgtagattaatagtggaaatggcattattgtgatggtgatgatggtgatgatagtaatagtggtggtggtgatagtggtgatgatgatgatgacaaagatgatggtagtgttgctagtgatggtgacattggtagtgatgatgacaatggtgatgatgatggccataatggtgacaatagtattatggtgatgatgttggtgatggtggtgctaatgatgacggtagcaaatgcagtgctgatggtgatgattatgatgaagcacaatgcctatatttttctgtgagctctggggtgacaggcaggcctctgagccttaaaaacaatcctagaccaagggtgcagctgggtcagcaggttgcatcattgtgcccggaggaagctgtttcttaggggattttccaaggtcagggaccgcatctccttcctactaagactgtagtaggagcagccgatggaactacttgagccccctggtctaggaaggagagccctcatctctaggggccagtctccttcacctgagatcaacatgcctagtgacagctcagtcctcaaggactctcacatatgcctaggtgtcctgcagaacaaaacttttgtttattgagctaattttcttttttctttttctttctttctttcttttctttctttttttttttttatatggagtctctctctgttgcccaggctggagtgcagtggcgcgatctcagctcactgcaagctccgcctcccaggttcatgccattctcctgcctcagcctcccaagtagccaggactacaggcgcccgccaccacacctggctaatttttttgtttttttttttagtagagacggggtttcaccgtgttagccaggatggtcttgatctcctgacctcgtgatccgcccgcctcagcatcccaaagtgctggggttacaggcataagccaccgcgcctggccttattgagctaattttcatctaaaattttaaactaaatgaaaatgtaattgaaatataaactgtgagatcaaaattatattgaaagttcatctaattgaaagattaaacattaagtaagatttagtacctgtttcatttaatattaaattgaatttaaactgtgaagaaatggccaggcatggtagctcatgcctgtaatcccaacattttgggaggctgaggcaagcagattacttgagcccaggagttcaagaccagcctgggcaacgtggtgaaacctcatctctacaaaaaatacaaaagttagcctggagtggtggagtgcttctggagttccagctactcaggaggctgaggtgggaggatctcttgagcccgagaggcagaggctcagtgagccgagatcgtgccactgcactccagcctgggcaacagacaccctgtataaaaaataaataaataggccaggcacagtggctgaagcctgtaatcccagcatgttggaaggccaaggcgggcggatcatcaggtcgggagttcgagaccagcctggccaacatagtgaaatcccgtctctactaaaaatacaaaaaattagccaagtgtgatggcagtcacctgtaatcccagttacttgggaggctgaggcaggagaatcacttgaacctgggagattcaagtgcagttcaagtgcaggttgcagtgagtcgagatcacaccatggcactccagcctgggcgacagtgcgagactccatctcaaaaataaataagtaaataatctgtgaagaaaaggcctgtaacatgaattaaccaatatggtagccactagtcatacgtgactaagtttaaaatgaattaaaattaaataagtaaaaaatccagctcctcagtcacaccagctcatggctatgagattggacggtgccaatatagaccatttcgtcattgccaaaagttctaccggacagcactgctgtaaaccaattatgtagaatgttcttaaagagtaaaaacaaaaccaaacaaaaccagaaaaagtagaaagagacaaccactagtccctcctctgtccctcaccccaaccccaggaactatgctgcatgggaagagaagagagctcgaggtggaaacagaattctcatattcagggaagagcagagaaaaggggattgcaaaagcagatggagagagtggccatgacatagtggggaggggctcaggtcaagggcagaaacagaatgatatgatggtattaataacaatctctgagattttatgatgtgcttactgtgtaccaacccttgttccaaggtatttactagtaagagcttactttatccccataggagatatccctgtgaggttgggaccagtattagttccattttacacatagcaagtaaagcacagacaggctgactccctgctatctcactgtatggtcaatgttgtaggctcctttgctaagggaccatgtaataatcataaataggttcaatatctaaatacaagacctcgcctgggaggtcagcgaggtcttggaaatgcagggttgttggctagtcttcaagagaggtctcaagacaaaaggtctcagagaattcagctgagaaggggtgggcccctgccttagggtgggctcctccctgggggcaggcccctcctggacctggaaccacattcttcacaagggctgcagaaggtgccagagtttggagtggggcagggaactcatgtggacagggctccagaatccctcctcattcccctaagagcagggccatttctgttttacggaatggattccatccaggggtgcatttttgcttttgtgggccctcctctagaaaaatattaaaaattatattttacgactatcttgatataaacatgtataaaatatagggtgggttgtattcagtttttttccttctgattttagaagaaattgaaacatttttgtgatccctaaaagtataatgggccttagtgcttctgtccataatgatcctgcttccactcgaatttcttcagacgaaaagtttccaggggtttctatccttgtgttcaaagtcattgatggagactgaatgagggacaaatgaatgagtcactgaggttgacttaatgtcaacctcatcatccaaagtgaaattttggatgattaggttgacattaagtcaacctcagtgactcattcatttgtctctcattcagtttctcggtccccccacatttcaccaagctcctggctttattcttgggcctctgatgaacaaaagatgaacaaactgctttccctgcccccagtaatatcacagctaccacgatccagccccctctttcagctccccttctccctccccaaaagatcaccctggagttactcatattttaatcatgattggatctggataccacccaaaaggcacaggagtggcatttcctagaataaatggtggggcaagagggagctgaggagacacacagcatacgtgtatgcgttttcactatgttatctaaagattttagaagatacatcttcaattatcttaatatttagatattgagcctatttatgattattatatggtcccttcaccaaggagcctacaatgtcgaccatacagtgagatagcaggcaatcggcctgactgtgctttacttgccatgtgtaaaatggaactaacactggtccaaacctcacagggatatctcctatggggataaagtaagctcttagtagtaattaccttggaagaagggttggtacacagtaagcacttcataaaatctcagatattattattaatgccatcatattattcaatgtgcaattctaaactgattgtgataaactcaagaaagttcaagggtatttcaaagagtgtatctgaatcacctcatcttccaccacctggaagaacccccctggcctggcagaaccacctccacgccactgtcccattcctttcaaaggcgccatgttctctatggtctggggcctcccctccgatatgagagcagggatctggaatcagagaagccagtttgggaatattggcctctgttatgttctggctgtgtgacctggggcaagtaacatcacctctctggaccctcatttcttcatctgcaaatgggttaaagtatctgtcttgcttggctgttgggagggttaaagataaccctgtcataagttatagtgcctggcatataattggtatgaagtaaattactgttattacctccatcattgttgtgatccctcataattaggccaacagtgcccactccttcctcagcttcacccggcctctttctccccacacagtggcatcttcctccagtgccctcggaaatctttaaaagtatggagatgttgaggactctcggtgcagaggtgcagccctcagaccatctcctccattgggtcccatgtgaggaagacttaggcttggacttggtgggaagtcgggccccttcacctctctctatccaggactctcccatgtttcttagggacctgagatgtggcttcttccctgatttctccccataggacaaatcgggctccatgagtgtccaccccagacctgaggacaagaccagaagggcaagcaggtgaggagagggtgatggagaagggctgggggtccccatagggccagcgaggctgaaaagggtccagggtctctttggagggtactggcaagagagggacccagcccagtcacacggaagcctggagatggaggctccagtaggaggtctgcagaccccacccgggacctgaagatgatgtcgtgggtagcgtggccattgggcgcttcatctgccaatcagagctggtcaatgggttgcaggtcggggcgggccatgcgcaaagctgggctctaattccaagcgcctcctccctcagctccggcgcttccagcttctcagatttcttcacccatggaatcaacagcgatgctgtaaacttatggccaaggggtgccaatcagtggttgttccactcagtgccgaatgagagaagagaccttagaatcaggcagggattaaatttcagtcctgccctgagtaccggagcgacctgaacgcagccccagtgaggctccctcacctggatgcaccgtggaaccatcgtcagcatgattagcacatccgtcagctcaaatatttaatttttttttttttttggtgacaacatttaaactcctctcttttagccattttgaaatattcaatacattattctgttatttggaacaacacggatgaacctagagaacattatgttgagtgaaataagccaggtacagagagacaaacactctacgatctcactatatttggaacctaaaatagtcgacctcagagaagtagagaagagaatggtgggtaccagaggccgggggcggggagtgtggaccgattggatggagaaagggagagtttggtcatcaggcacgcattttcagtttgacaagaggaataagttctgatgtcctgttgcacagcatggagggctgttaattctaaaggaatcagtctcgggcttctttgctgcaggggtcgtgagccctcaaacaggcctgagtctctgcagtttctcacttggggatgttgatctcggagtactcatagccgatggcctcctgttcctgtgggtactgaggcctcgctttgtggaagctgagggatgcatactggatctctccttcctctggggagggggtggccagggctggcggagcatggtgtggggggctgtcatctgccggggattcaatcaggggtccctgaatggaggaagagaagggagtcagtgcagagcagtggggccagcatgcaccagagagcatccaggaaggaggcccaggagttccttcctccattcatcccatgtgcactttgctgaaatctctttaatacgttcctctaatgtctaatactcaattatcaccttatgtggtgtttactaatctcattaacttccaacaacaattccatagtaagatattattattgtctccattttataaatttgaaaactgaggtagaaatggttaagtaccctgcgcaaactccctcttataccgggacccaatccagtcagttccttctgaccccaaagcctggagtcctgctgaggcctcctgtgtgtgagttcctgggctgggtgctggatggactgtggtggacacggtaggcatgggctctgaccccctgcatctcactctttaactgaaggaggtggcaataaatgactgccaaacaaatgaatatctatgtgtgaattatgataagatgggtaggaagagggcaagtgagagagaattacagggccttgattcagacgtggcacctgcccttgagaagctcacagtttggtggtgtggggaagacaagtcaataaaataaattatatccctcttataggaagaataatgacccctccaaaatgtccatgccctaatcccctggaacctgttgatctgttaccttacatggctaaaggggctttacagatggaattaggttaaggatatcgagatggggaaattatcctggattacttgggtgggcccagtggaatcacaggggtccttacaagtagtgaaaggaggagggcatagatagattggaagatgccaggctgcttgacttgcagacagagggagggtcctgagccaaggaatgcaggtgcctctagaagctggaaaaggtgagaaagcgcatcctcccctggatcttccagaaggaactggccctgcctgccaatgccttgattttagcccagtgacacccattttgggcttgtgaccttcagaactttaagttaatccatgtttgttgtttgaagccaggaaatgtgtggcaatttgtcacagcagccacaggaaactaatatagactcacacggtggagagtgacagaggctgcctgggaggcttctccttcatctctgaacttccctgctactcccctgcacagcagatgctccatggaactgtttgtgatttcactcccccattctgtcttgattactcaaattaacattcacacacacaccacatctcagcactgctgttatcaaggtcaccatgaccactgcttggctgagtccaaatgtccgtcttgcagtcttctccttcttggacttcacagcagcagaggacccagctgctcaccttccctacacagaagcccttcttgacttaactacaggacatcgtgctttctggctccatcttaccttcttggcagcccttttgctagatgctccacatctccctgaccctaaatatcagagcagccctgagctcttctttacttttgctttgcaatctcatccactgtgttgtcttcatgccatcaataaactgacgacttccaaatttacacccagccctctcccctctgctgactatagtccttgatccaatagtatacttcaaacccacacatcttgtcgaaaggcacacaaaatgcaacctattctatctgaactcctccttttttcccccagatctctttttttgcacaatcttttctgcctcaatgactgacccctccattctacccatggattggggcaaaaatctggaagtcttcttgctccctctctgtcattcacattgtacacccaatctattggcaattctcataagtctaacttcagaatttacccataagacagccatgtccaccaccactgccatcttggttccagccagcaccacttcctgcctgagatgttcaccagcctcctctctatcttctctgctctgtctttcctctaccacacacagtctcttctgcacacaacagccagagggatcccatgaaaataaaagttaatcatggtctcttgcacaaaactctccaaatgctcacagtgccctgtgcagccagacacgattcacacacaggctcaacttctccaaagtcatttcctgttcttggccttgcttccctctgtctaatcacacagacgtccttgtggatcctctcactggtccctcctgtgcctgagcctcaccctgttcttccctctgtctggagtgctcttcaatctcacagtcagtgtcagatctgagcctccttcattcctgtgctcaaacatcactaacagaaacacaagtcatcctacagaatggtagaaaatattttcaagccatacatctgaaaaaagttttaatatccagaatatattaaaaaaattcttagaactcaacagcagagaaacaacacagtttcaaaaataggcttaaactctgatagactttctctaaaggtgatatacaaatcaaaagaagcatatgaaaacatcactaattattagaaaatgcaaatcaaagccttaatgagatatcacctcacacgcgttaggatggccactgtcaaaaacaaacgaaaaccaaaaagtaacaagcgttggtgaggatgtggagaaatgggaacccttgtgtgacatttgtgggaatgtaaaatagtgtagccactgtggaaaacagtatggcagttccttaagatattaaaaaacagaataatcttagagtccagaaaccctacttgtggatatacacccaaaagaattaaaagcaggatattgaaaagatatttgcatgcccatgctcacggcagcattattcacaataaccaagaggtggaagcaacccaagtgtacatcaacagataaatggataaagaaaatgcggtaaacatacacacaatgcaatattaattaccctttaaaaagaaggaaatcttgtcacaccttacaatgtgggtgaaccttgaggatatttgttaagtaaatcgtccagtcacaagatgagcaatactgtatgatttcacttatatgaggtatctagaatagtcaaattcataggaaaataaagtaaaattggtgatttccagtggctgcaggaggatgaagaggatgggagggaaagggcggagttattgttcaacgaatgtggagtttcagttttgcaagataaaagggttctagagatctagcacaaccataaacttaataaagttgaggtggtaaattttatgttatgtgttattttccaccgtagatggctggatggatggatgggtggatggatggatggacgggtgggtgggtggatggatggatggatggatggatggatggacggacgggtgggtgggtggatggatggatggatggatggatggatggacgggtgggtgggtggatggatggatggatggatggatggatggatggacggacggacgggtgggtggatggatggatggatggatggatggatggatggatggacagacgggtgggtggatggatggatggatggatggatggatggatgggtgggtgggtgggtggatggatggatggatggatggatggatggactgacgggtgggtgggtggttggatggatggacggacggacagacggacagatggatggatggatgaatggttggatgaataaacaaaaataaacccacaagccttctccttggaacttcctatttcttctacattgcattttccctaaagcatatatctatctttatattttattcatttgttgttttattagttttgattagttgattggtttggccatatccctctgtatagaattaaacttcgatgagcccaagacttttaaatgttttccacagatgggtcgctggcatcttctcttaggagatgctctataacttttcctgaatgaattaatgaatgaagggatggatgttactctgctactcgaaaccttccacaggcttccagtcacattcaatacaatcaataaatgatgagtgtaatatttatatcagggcatgaaggatgaataggaatcagggagtggggagaaaaaagcatctgaggaggaggaacagccaatgtgaagacgtagagacacaaataaccttgttggtgatgacactggagtccagcgttgatggagcatggagcagaggcaggagtggctggaggcggggctgggattggagcaaagccagggaagcccttacccagagcacaaaattaaaagggtgccccaaatctcagcaatgaagatgaatacaattttaacacaatatttaaaaaatcaaaattaatataaaaagtccatggaaagcctgggcgcggtggctcacgcctataatcccagcactttgggaagctgaggcaggcgatcacctgaggttgggagtttgagaccagcctgaccaacatggagaaactccgtctctactaaaaatacaaaattagccgggcatggtggctcgtgtatgtaatcccagctactcgagagactgaggcagaattacttgaacccgggaggtggaggttgtggtgagctgagatcgcaccatcgcacttcagcctgggcaacaagatcaaaactctgtctcaaaataaataaataaataaaaataaaaacaaaaaattcctggagaacaaagatttaaataaacccagattagtgacagtgctctgctgagccaaatggaacttgaagcaaaagctattcaacgtgcagaggaagcagacagtgatggctgtggaacgtccctccaggccgggaaggggaggcaagaggcagggaggtgaggaggtcccagacagagatccagaggcttcagcagtgagaggggtcaggatgggatggggagggcaatgaaagctgttcttaggaggaaaaagtggacaggacgtgatttttcggctgtaggggaagaaaggaaggacagtgaggaagtaatccccttccatgcctggcctgggagaaagcaggggagaagggctgtgattcaatgctcactcacctgagaggctgagcccctgacagcgtttgcgtcctccatgcctgtatcccccacgcccactgctggccttgccgatttcttcctgcaggacctcactctgagtgaagagaccagagagcctttcagtgtggtcagatcggggtgcagtgggcagaccaacccctgccctgtatttcctattggggagctggaggggtaactgaggcgggaggggagtggtcccattccagagaccccaatgtcgaaaacagaggctcttttttcctgggcagtagggtctgaggtttgccacagacatggagctccacaaacaggggcgctcatgaaattcttaccatgcacccatgacctcattctggcccttgcttcaagctcttgacccatccaggtccttccaggtctggcttcagggattttgttcccagcctgccctcccccaaggctcttcctccccagggtcaatgctcacacaacgaagatgatgcagaagtacaggaagaccagggctgtggctccagctcccccgaatgcccctagcgtcactcctgatataggcctcattttgcctgaggatggattggagttgttttggggtttaccctccaagaactgggcctcttctcctcccactgcctgtagggccccagacttgggtaccccagtcccgcttcccggacagaaagaacaaggacggaagggaacttctcctgaggtcactgaggcatgagagtgctgggtgcagtctgcctttatttaaaattttgattagttttcaccatggaattattttacaataatttttaattttcgaaaagataatcacatggcaagattatttctcttgcttgctgagttgttttatttttggttcttaaattgtgtgcccaaagtgagtgcctcacttgcctcacactagtccaggcactggaaagcaaggcccttgtatccccaaacacacttgtccaggccccagctcctcccctccaagattaactcctcccctctccccaccccgcactcactgcttggcagcaagaggactgtgatgctgtgggttgcagggaaattccaggtctcccagctggaccctgagggtgggacatgtgtgttctcctcctccagaccctcccctacccacctgtgtactcgttttgcagggagaggctcagggaaatgtgctgggagcctagagggttctgagctcggcaggtgaattccccttcatccttcacatgcactcgaggcagctccagcaccccaaggttcgaggactgtgaggggctcagggtcaggctcccccaggtccagctcagcctggcagggggattgctgtcgacagcacagacaaggtgcagggactggccctccaggactgaaagggccgagccattcctcaaggttgtggatgctgtagagaaagagacagaagggcagagagagacaaagtgatcgaggcagggaggaaggatacagaaagagagtggtgaatggaacagacactgatacatgctgaattgtagggacatatgcacgttcactgctcactgttggggatgtaaacttgtccatctttaattagaacaatttcactctatctttcaaaatcagaaagacatatgacactgctatattttgcttttaggactttattccatacacttagatattccttgtgggagtagatacaacaatattcattgcagtgtttgtgctgtaggataaaattagtgccatgatcttccattagaagatgccacaaaatcagagactattcagacagtggaatgacacacagccctagaggagggtgcaaacagtctcactactgacatcaaaccacctctgagatcttccaggtgcacaaaccaaggctcaggacagcctggacagaccctggtcgattctggggacagactctgctgtgcattataaatttttgcccatgtgactatagtatgtatccaaaagaatatacctcagaactattggtgaaaataaaaggatgaggcaatattcaggagctggaagataagagtcctcaaatccttgagctgctgtgtgaatgtccctctacccttgctgtggggccaaaataggtgtgtgtgtggaggagttcaaggggagtgaaggggtgatgagaaggtgctcaggtggccaaaaggctgaggctgagggaggggggggccggggctcacccacaaaagggtctcaggtcaccagggtgagtcctggctctcccctgagttgaaggctctgctcctccagccccagggagaggactccatcttacctgtgccatctccttggaagacagtcatggtcaagttctgaggaggatctggaacagaaagacacggagttcccatcactttgaggactggggacactgaccctgtctccccaggagccccataaatggggaaggtggagccagcatcctcctgacccccaactcccagccaagattccaggacccagatccttgagtctgggtcccacatccaactggcctcaaggaatcccgatcaaagacccagacgtcctggcccagaactcacaggatatgttgagtcggacagccctggtcatggtcacgccggccccaggcaaggtcacctgacaggtgaggctggtgccatggtcctggggctgtgggatgaggctgagcatcgaggagcgagtgatagtggggtccagggaggacacggaggcccccatccaggtgatcgtggggggcgtcccctgttcacaggcccagggcacagagcaggtcaggttcctggggtggccagactccagggtccccgggatggagaaggtgggcatgtgagtcagggctggtgatgaaagggagacaggcaaaatgagggtgttggggtctgaagtgtggtgctgaggaggctcaggctctggtcttactcctcccctgagccagatatgcttcacctccaactccctcccaggatgggggtcccacctcagccctaccctgcggccctcgggccttcccctctggctggtcctagagccagagatttacctgtcacatgcacagagagcttgtcatatatgtagttccatttcctgcttcctctctccacctggaagtagtacttccctgaatcccccttcctggcatctctgatgctcagggagcagttgttggtctgtgggtccccaaggaggaggaatcgaccgtgggtatcctcttgcacttttccacttggggtgtttgtggccactggaatatcccatggtatatcggccccttccttgaaccaggatccataaacagggctagaggcagtccagttgtaatgggggtaaaggacactgcagggcacagagacacacagaccctcctgcacagtcaccgactctggcacctccagcctgtatcttgacagtaggtcctgggacgctgtggagaaacgagggtcagcccagcccccactgtccctctcttcatttgcccatagcaggggcagcagcatctctgaggcagaggcttcctgggctccctgtgtgagcagagaagggggagggagaggaggggcagggctgtgggacccacagggggctggagaggagctggagacctcagccctgcatggaagagaaactgcaaacccacatgctataggaactcattccctctgcacagagtgaaggaaaccctaaagctcagagaccctagagacccacccagggaggagaagagaccgtgtcccgcctcctacctccgggcttccctgaagcaccagggcctgcaccagacacgtaggtcctgccctcccggcctctggaccatcgtggaggtccctcctgtcttttgagcatctaaatgtggatctccgaggacctcggggcatgagagatggaggggccgtgtgctgagtctccctgtccaggctcaggtgcctctgctgcccttggtttgcgccaggaagtgcttcctccctggcctggcctgagagagtcacggggttgtgtagacctaaggctctcaactggggaggacttaaccccccaggacgtttgacaatgtgtggagataattgtctcgctgcatgggtggggtgggtgcttctggcatctggtggggagaggcctgggatggtgctaaaccccggccatgcctaggacaggccccaaaacaaggagtcataaggccccacatgccacagtgccagcgtcagaggcaggatgaggatgtcaggcctgtgggtcagggctggtgaggggaggggcttgcaggatcaggaggggcatccaaggtgcggtcctggggaagctcaggctctggtccagctcctcccctgagtccatcacccccggccccctcccaggacatgtgtcccgtctcagccgtgccctaaagccctcatcacatttgcctttggcctctcttggagcccgtgccttacctgtcacattcacagagagctggtcatatttataattccatttcatatttcctctctctacacaaaagacgtatgtccctgcatcactctctctggtgtctctgatgctcagggtacaatccttgttctgtgggtccccaaggaggtggaatcggtcccgagtctcctcctgcactgctcgagctgggttgtttgtggccactggaatgttccggcttacatggtcccctgcccggaaccagtagccatgaactggatcggaggcagtccagccattttgggggtaggagaaggagcaaagcacagagacacacaggccctcctgcaccgtcacggacttctgcattgtcagcaggtaatccttctgttccttagcccccactctcccacagagcaggggtggcagcagtagcagcagcagtagcatgtgtcgggttggaggtgccagggttgctgaggtaagtctgttcctcagggttcttctctcaggaactgagaactcaagatttcgaggaagccgcacaggaagttgggggtgggttctgaacggtgacctcacaggaggaacttcacacacagacactgtcagggccgggtcacccctggaagatccaccgtccactaccccgtccactcctggggaccctgaggccagagaggatgaaagactcacccagattccaaccccatgcagggcccaccccgcccactgcctccctctcagtgcccttccccttgggtgatattttccataaggtgaaaatgagtcccatgtggccagacctatgaagtacaggctgtggatgtctctctgtaggtcagaggtgacactaggatataagagatgggggtgcaggtgggatgagcaggcaacctctccttcctccctcagcggccgtgaggtggagttcaacacagcagagctagacactgtccccaaagagtcactgtgtagtggggagacactgaggctcctgatatctgagctctccatggcaggagcttcagtgggggtaccaggcagggtgtggtcgctctctcctatgttggggaatcagtctcgggaggactgagcagagagacacggggtcgtggaggtgaggattccgtgtgttgatacacaccaaagacacagagaagagcccagttcacaggaggcctgagaagctaaggctgtgactgttgtacagtgaggtctggaagggaggaatgttggatgggaagggacagatttctaaaggggcaggcgtttctctctcggccatggctctctgggttcaggatgggatccttcaccactgctctctcacaagtcctccttactccagagcatgaggggtctgctggccctttgttcctgcaggctctgctcccagggtttcaggtgaacaggagacgtggagcgaggacaccagccctggcgtgtccacgctcaatgatggacaggatttcatgggagaagaaatgcacctgaattcagcagaagagtttttgaaactgtatgctatgtactgggaggaaggtggggaaaatcctgcaagattcgccctccttagacccatgtcagcttttcttgaaacaatgatttttggggaaatgtaatacaagtaaataaaagtgccacctaaaaaaatgactcagtgattttcaccaaattatcactgttcaagaaatagaacatcacaagataattgccaaatttctcccatgagatgaagaaagaaattgcattcatttattcagccctgtgtttccccttcctataggccacatgcagttcctcctgaagatgccccagcctcactttaatgataatggtctccttgcttttctatgtagttttatcatctgagtgcactgccttcaatactatggctttgcataggtttttctaaagactatttttacataaaaaccacaatctgttttattttactcagctccatggatcttcccatccccatgttgtccccaattgcccataacctggagtagagtcagttggctgtgataattgaaaaggaaatgtgcaggattggggcatgcatagctgctcctctccctgacaccactaattcctgcatttgcagcttgtatctcatcctgcagaccaatctgctcctgggcccccatccttgccgtgtcactttcttcccgtaaggacagttgcagcatctcaatgggaagaagggctcgaccacggcccatctctttcccacagtccccagttggcaaagaaaagcagaaaaatgggaaggagagacatgaggaagccacagagaatctgcaaaggaagaacgtttgaaccacatatgactcagaggagctgatgggccctctagacccacttccataatttggagaggaagatattaaggaccagagtgacaagtgctacagctacatgtctctcctcaaaattcatttgttgacctttgaacccccatgtgatagtattagaaggcatggtgtttagataggtggtttggattagcctaataggattagagcctgatatggtttggatctgtgtccccaccaaatctcatgccgaattataggcctcaatattgaaggtgggttgtagtgggaggtggttggatcacgggggtggatttctcatgaatggcttagcaccatcttcttggagctgttcttgtgagagtgggtgagttctaacaagatctgcttgttgtctgtgtgcagcatctccccatttgctctatcctgctactctggccatgtgacatgctggcttcccctttgttttttgccatgattgtaagtttcctgaggaactccccagaagccaagcagatgtcaacatcctgcttcctgtacagcctgcagaaccacgagccgattattcctcttgtctttataagttacccagtcacaggtatttctttatatcaatggaagaatgaactaatacagaaaattggtacagaggagtggggcattgctacaaagacacctgaaaatttgaaaacaactttggaactggttaacaggcaaaagttggaagagtgtggagagctcacaaaaagacagaaagatgaaggaaagtttgaaacttcctagagactggttgaatagttatgactgaaatattggtcgtgatatggacagtgaaggccaagctgaagaggtctcagacggaaatgaggaacttattggaaaccagagcgatggtccattttgttatgccttagcaaagaacttcactgcattgtgcccctgccctaggaatctgtggagctttgagcacaagagtgaagattttcagtatctcgtggaagaaatgtctaagaagcaaagcattgaagacatggcctggttgcttctaacagcatatgctcatgtgtgagcaaagaaagaaatcactgaaagctggaaattgtatttaaaagggaagcagagtgtaaaagtttggataatttgcagcctggccaagtggtagaaaagaaaagcccattttcaggggaggaattcaagcaggctgtagtcccagagaccccaacattgaaaacagaggctcttttttcctggacaatggggcccgaggtttgtcacagacatgtggccccacaaacaagggcactcatgaaattctcaccatgcacccatgctcattctctcccttgcttcatactcctgactcagccaggtccttccagctccggcttcagggattctgctcccaggccaccctcccccagggctctcccttcctctccagggtcaatgctcacacgatgaagatgacacaaaaggacaggaagaccaggctggggctccagccccccttgaccgcctgcagcatcactcctggagggttctgagctctgcaggtgaattccccttcgtccctcagatacacttgaggcagttccagcagcccaggattcaagggctgtgagaggctcagggttgggctcccccaggtccagctcagcctggcagggggattgctgtcaacagcacagaccacatacagggactggctttccaggactggaagggctgagccattccccaaggtggtggatgctgtagagaaagagacagagggtcagaaagacagtgatcaagacaaggaggaatgatacagaaagagactggtggatggaacagacactgatacaggctgaagtgcagggccatacacaccttctcagctcactgttgggaatgtaaacttgcccacttttagttgagaacaacttcattttattaaaattagaaagaacgtataacactgctatattttgcttttaggaactatgctatacactcagatattgcttgtggaagtagatttatgattattcattacagtgtttctgcagtacgataaaattagtgccatgattttccactgggagatgctacacaatcagagtccatccatgcagtggaatcacacacagccctagaggagggtgtgggcagtctcactattgatattggagcacctctgagatcctccaggtgagcaaaccaaggcccagggcagcctagatggacgctgggcgattctggggacagactctgctatgcattttgaattttcacccatgtgaccataacatgtatccaaaagaacgtagctcaaaactattggggaaaaggaaagatgaggtaggtggtgttttcaggagatggaagaaaacaggcctcaaagcctgtgttgtgaatctccccctgcctttgctgtggggctgaggggtgtgtgtgtggaagagtcttaggggagtgatagggaagtgtagagtcatcagcagcttgcaacctcaacatggaaaagctacaggcactcatctccaacctatgagagcagccacgtggcctacacctgtcaaagccacaggcagaactgcccacggccttgggagctcaccccttgcaccaatgtgcccaggatgtgggacacaaagtcaaagattattattaagctctaaggtttaatgtctgcctgcaggaatttggatttacatggagcctgttgccactttctttggggcaatttctcctttttggaatgggaatatttccccaatgcctgaaccaccaatgtatcttggaattaaataacttgtttcctatttcacagggtcataggtgggaagaacttgccttgagtctcagatgagactttgcactttcagttgatgctggaaagagttcagatgttggaggactgctgggaagaaattattgtattttgcaatgtgagaaagagatgagatttgaggagccaaggcagactgatacagtcttgatatttgtcccctccaaatctcatgttgacatgtaatcccttatgttggaggtggagcctggtaggaggtgtttgggtcatggtgccctcccatgacaatgaattctcactccattagttcacagaagagctggttgttgaaaagagcctggtgtctcttcttgctccttctctcaccatgtggcatgcctgctcccctttcaccttctgctatgattagaagttttcagaggcttcactaaaagctgagcagatgctgattccttacttgtacatcctgcagaaatgtgaaccaaataaacctctattcattctaaattactcagtctcaggtattcctttacggcaatgcaaaacggactaacacaatactttaagtcctctccagattattgataatacctaatacaatgtcaatgctatgcagctagttgttataatgtattttaattgtattatttttcatgattgtgttgttgttcttattggtttttgtttttttgaatatctttgatccccagatggctgaatccaaggatatggaatgggtggatatggaaggtgcactgtatccatttgaaatgaggccacttgtatgggtcctaattcaatataacttctgtccatctaggagagaagattaggacacagagacacacaaaccatgtgaggacacagagagaagtcagcagctacaagccaagtagagagttccagaaggaaccaactctgctgacatgttcagcacaagaaccgtgagaaaaaaaaattgttgtttcagcctctctgcctgtggcacgttgctatgagagcttgagtgactaacaaagtggataagagaacaaggacaaggcggagacaggaacagctaggggtcacctcctccagaaggcctctcctgactttcctccattacaaagagctgaccactcccttcccaggacctgtcctgaatatctctccagcatctgggtcacttaggagacccccagtgcttttctatttttaagagtcttcatttaccaacttggggtccctggagctcatatgccatgtaagattcacctccatctatcctctttaactcagcatctgtttggtactcccggtgcacggaggttgagggatgagctccttgtctctccgtgaccaaaacagagtcatttcaggaagtgccaagtgaggggacaatatcttgccgagtttactccactcaccccacataccccaagcccttcatgttgcctgaaactctcgccttcagtgttacctttgagtacaagtgttcagatctcaaaagctgttacaagcattgcccaattgaatgacagaggaggaagggagactgggaagtggactaaggcctagtgggggtgggagggtacttctgggagaccaaaggtcagtgagttcaccaggaagcatgaaggcgtggggctgacaccagcctaaggtggacagatttatcaaaacaaaaaaaaaaaccatggaacatatgtggttgaatttgaatttcagataaaaactttttttttttagcgtaagcatgcctcatgcaatatttggaacatacttatgctaaaaaatatattatttattctctatctgaaagtccatttcaagcaggcatcctgtattttatctgagacgaccagccccctccagcaactgttcctcccctgcatccatcaccaccactgctggtagcccagataaggggagttccctgtggactttcattgctgtttcctcactgacctctaaattgggggccagagggagagcccccaaacccctctgcacccatagccatgcccccaggacagacacagctctccctcttctcttccctggagggggctctggaaggaccagctcagcaaacccgaggccaggcagcccccaggagacccagaggacaagtggcaaggtgggctggggactggggaggaagggaaaggagtccttccacccttggtggtgtccatgtgccctgctccttctgctacccccaagacagctggactgactctgacccacttcacagctattggttaggggaagtggcccttccagcctcagatgctccagtggccacaaacaacccagatagaaaagtgcaggaggagacccagggacagttgcaactttccagggaccgacagatcaatgactgctccctgaggggtcatacttctttcacatggagggagggaatatgaaatggagatacaaaattaaccagttgtccatgcatgtgatgcgtaaggcatgggctccaggagaggccataagcaaaggtgctgtggcggcagggcagggctgggactggatctccatcctgggatggcatggcgttgatgggctcaggagaagaactggaccagagcctgagcttccccctgggtggcaccttggatccccgtcctaatcctgcttgtccccctctcctcaccagccctgacccacaggtccaacccacaggcccgacatcttcatcccaataaccctggagtcggctgccccagcaatctaacctgctctgtgccttgggcctgtgagcaggggatgcctccgacaatcacctggatggggcctccatgttcccactgggctccacctcggtgccctccacagtccaggaccacgacgccagcctcacctgtcaggtgactttaccgagggctggtgtgaccacgaacagtaacatccaactcaatgtgttctgtgagtgttgggccaggatgcccaggcccctgactgggtttccctgagggcagtgggatgcgggtcagggttggacacagggatctgggtcccggtatctgggctgggagtcaggggtctggaggatgctggctccaccttttccatttatatggctcctggggagagagggccagtgtccccagccctcagagtcacccaccaccatgtccagctaatttttatatttttagtagagatggggtttcgccatttggccaggctggtctcaaactcctgagctcaagggatcctcccacctcggcctcccaaattgttgggattacaggcatgagccactgcacccagcctcagcatgagatttgaaggggacaaacattcaaactatatcaagtatagaggaggatgtgcttatgttacatgcaaatactctttcattttctatcagagacttgagtatcatgggtttttgtatccaaggggggttcactcccccactaataccaagggacagacgtatctctttaaagatgtgtttccaaatacagtcacattcttaggtactggacgttggatttcaacagataaatttggttggggagaggaacacaattcagaccctaatatttaccttccccttttctctgatctctggttccccatgagccaccaacatgtgtattctccaaaaaaaaaaaaaaagttatctttttcctgggaacgctcatgttgggaaatatcacaccctcccctccatccacagagctcagaaaaaaggcctctcacaagaaggtgtaaacggaggagggtgtgggtgtggttccctcagacctcagagctgacccctgaggtcctgcaatcctaggcccagccccacttctgcctttgggcatttcatacccatatggaaccagctgacaggaaccaggaaagtggtaacgtctccgtcctcctgtggatttttctatgccattgttctcagttgcccatgggccagagaagggagagaggaccccctgccaccttgaggctgaaaggtgccaatctgggactccccagtggattcagaggcctcaccatctccactgagagtgtggccccccttgggttagatctcccttttaaccttagagctgatccccgtggtgagaatgaggacctatggacttcagcactaggggaggacagtgtggggtcaggcagcatctgtgtgcacagctgaattgaagcagagctgggtttgataggaagagaaagggagagagggggtcaggggccttcagtggctctgctgtgggttgatccttctcactcctgggaggtgctgccaagagggtcctggaaaagtttctgagcccatcagcccctgtgcctgtctccctgcaaacttgtgggttccctcttctcttcacaggaggatttctctgaggaaatgtcttccttcatttcctctccaccctatttcatcttgctctgtccctaccacatcattcaaacggttctggtcaggattactaacgacctccaaagtgctgaaccacctgtacaatttctattctcatctcacttggatgcctctctctcagtagcattaggctcagtcactcattcctgtttaaaacacttcatagattggcttctgggccacctagagctgccaccttgcaccagttgtgggcaacacacacatactcctaagtcacctgcctggatcaaactatatgtaacatactagaaacttcatgcctccttctaccttcctaaccatcttccttatctttctaagggttcctcctctgttcctgacacctaactgttgaaatccatcctattccaacatgtcctatttgaaatgcgaaatatgaaaaggttcctatttcatatactgttttaaaaacacaagctaccaatgtcaattctttgattttcagatcatcatattctcatatcctatgatgatagtgaaggaggctgaggggagggtgtgtgggtcctccctgtacatttctttgcaacttcctatgaatctgtagttgtttccaaatcaaaaataaaacaaaaaaacaaaaaacgaccatgaaggcacatgagaatgacaaccaagagactcgctgatgactggtaaagttggatgccaaaccctgaccatttcctgtctctgtggcatctactccgggaaatgaagtgggcatctccagcctcatatgttccaggcagcactcagtgtttctctcctcaaacttcctgcagggggcgttccctctggccctttgggatgtctgagcatcagtatcaagtggtatctgtttgcatctgcctgcatcccagtgtcatcctgatttccaattcccatatacaatctatccacacggcctgtcagttaaacttttttttttttattagatggagttttgctcttgtcgcccaggctggagtgtagtggtgtgatttcagctcattgcaacctctgcctcccgggttcaagcgattctcatgcctcagtctacctagtagctgggattacaggcatgtgctggcacgcctggctaattttgtatttttagtagagacagggtttcaccatgttggtcaggctggtctccaactcctgaccttgtgatccacccgcctcagcctcccaaagcgctgggattacaggcaggagccaccgtgcctggccttgtattttttatttcttagttaatttcactggctaggacctatactacaatgtcgaatagaaataatagggcagatattccttcctttctcccaatcttaggggaaaaagtgttcaatatttctttattacgtatgatgctaattgcaggtttttagatgctcttaatcaaatcgaagtttttctcttctagtcctaatttgttgagattgttttaaattataaatgtgttttaaattctgcccagcgttatttctggagtaatcaagaggcacatttgatgtttctcttttattctggtagcgtggtgaattacatttatttttggatgtgaaaccccacttggtcatcatgtattacgtcaattttatttgttggattggatttacttatatttaaatgaagacttttctatgttcatgaggtgcagtgatctgcagttttcttttcttgtaacgtcctcatgaagctttggtatcaggtttgaattttgcctcatgaaatgagtgttttctccttctctatttactgagggagtctgggaaagtttgatattatttctcctttaaatgtttcgtagaattccacatacagtgccatcatgattaattaattacctatgattgagtggctattaagcaaatgccttgaaggatcgaatggcgatgctattcactgctgtgtgagcattaatgaccacaaagactgtgtggtaaactctctgctcctaactctgctggaaaacctgcaaagggcaagtgccaagctcaggtcttaccttgtaggtcaagttatggttgtaaactacagaaatgccttatgacttcaaacaatttcatgtcatttgactatggggacaatcttgcaaaaaaaaaaaaatcagaccccaaatttaattgtatttattgaagaattacgacataatttgaatttaaagatttgtctgcgcttcttataggaaatttagggcagttattggaaaggactgaggggcttgggcttggaaaggggtcttgcatgaagatcaagtacccaagaacatgtggatgacccctatgcatggtctttggataaagtcgaaaatcttcaacccccttgccccaagactttttgaaactctcttgataccagaatatagcctgatttccttggtctggagagattagtctttccttactggaagactctaataattctgcttggagagattgcccaagcacaggaaggtgctgagtctcttcaaaactcatcccaatcactattcattccagaccaagaataaaatgcaagtctcttccatggggtaaatgcaatgcccgacccttgagaagatcttacattctaaaggaattattggattctctgatttatatcagcagacacctgagaaatatatgttaaagtggacactaggaatcttagaccaacaaagataaaatattacactggcttagccaaatatattgatacgggtgtactaacaaaagattacagatacaatgttttggctcaagaagctctcaggtggatgaaggaatttgctttatgtttgattgaaacaatattatcactatattccaatgaaaatggactcaacaatgacccaaatttaacgaggatgatgtcagaactttcttggcataatggagaaaaaataacccaaaggtttagagagttaaaaatgttggaaaataaaaaatgacaaaagttcaacctgtaccctcatctcctctgctcttacccctcaagtagtatactggtaaagacagcacaagtgtccatgaaaagctctgtgaagactaacctggttcagcctattttttttcaccttatatattctgaagccattctttgcctatttttgccttacatattctgaagctattttatcatgtgcaggtaaatttctaatgtatcttcctagtatattgaatatttaatccttaaaaaattggcccttttatctccattaacactttgtttggtaaaagatatattttctgatattgacatacttatgatggtcagtttaatgtgccaatgtttctaggttatagtccccagaacattcaatgaaacgttaatctaggtgttgctgtgaaggtgctttgtacacaggattaagatttatgatcagtttattggggatgacagaaagaaatactgcaacggatataatcacactgctttcaatcaggatgatggaattgtcaaaggcaatgtgtcattacttaatccctagagataagttgagcacattagctttaaagaggatcagagataaaatgggaggtcatcctacccctaccaaagaagctcaattcttgatagtcacctttggattttggaggaaatgtacaactatgattggatgctctaacccacttactacgtaaatcttaagacttccagtttggagttgttctcagttcaaggaaaggctctgcagcaggtccaggctgtagtataagaagctttacaacttgaggtttataactcaagattaaattatacttgaattatctggaataattaagaatgtcggtgtgccccagagtgaagacccctaggacttttgttgcaaagccatgctctgtttttgagaacatgatggatctcttgagaaagagcttctgacttattaccaggccttggtagagactgatacccttactatgggatatgaagcgaatatataatacaaactgcccatcatgaagtaggtgctctgtgacccatcaagctaaaaggttgggcatgtgaagcaataatccattatgaagtgaatttggatatgatataactgacttcaagatgggcttcaagaagtccagaaatcacaaccaagtgacatgagcaggtgacccagattcctacaactcctcctgggatattgccttattttttcatgaaatcacatgtgtgacctcatgggcagttctttatggccattgcttgaggaggaaaacatttcatcttggttttcaagtggttctgctcaatcaactggcacagcaaggagtggacttttgcatcatgacaaactcaaccacagtgaacctgagagcgggactgaaggaactccccctagtggcagaatttcataaatacatttggcttttcattttgagactgagaggtcagaaggacagatacaaactgaaccatgcctacagcgttaggtaacacattttttcccagaaatttgtccattttctataagtattcaaaacttttcatacagcttactactttctgcttattttgcattagattaagtaatgttttctcccttatattcctgcatactagttatttttgccttctatatttctggactaattgcaactgaggtttgcccattttattatttgtatcaaaaactagctgttcgtgatgttgttcctttctactgaatatgttttctatgctatgtgctcttatcatttgatatttccttctctccaattccttttggttttgttgttctttttctaagttcttgaaattaaagcttagtttattaaattttagcttttcccaccctagcatatacatttaaggttatatatagttcctctaataaatgctttagttttactctaaaagttttatagtattttcagtatccagttttaaataatttcttatttgtgttatgatgataatgatgacaattttttttaagatggagtctcactgttgcccaggctggagtgcagtgcctcccagatccaagcaattctcctgcttcagcctgctgagtagctgggattacaggcacatgccaccacacccagctaagttttgtattttttttttttcagtagagacagggtttcgccatgttgcccaggctagtcttgaaatcctgacctcaagtgatctgcccacctcggcctcccaaagtgttgggattacaggcatgagccgccacgcctggctgtatgttttgattatttaatctatgacttattttaagggattttctaagtttccactaattatgtacagttacatagacattggtatataattacattttattacttattttgagcttaataacattgaaatcaattaacatattctgtatggtttcacttctctgacatatgttgaaatatacttttggcccagtatatggtaaaaaaaaaatttttaatactccatgtgtgctcaaatagaatatgttttctgcagttgtttggagcagtttctacctatggccatagaccaagtttgttaatcatgttatttatgtatactatgttgcatatccttaacaattctcttgtttgtgtgtaccatcagttattgtaaaatatgtgttaaaaattgccctccataaatgtggattaggctattttgttttcactttgcctattcttgccttatgtattctgaagctattttatcatgtgcaggtacatttcaaatgtatcttcctagtagattgaatctttaatccctacgaagtggtcccttttacctccattaatacttctttttgtaatagacatattttctgatattgatatattcagttttatgtgtcagtgtgtctaggtaacagtctccaggatattcaatgaaacattaatctaggtgttgctgtgaagatgctttgtacacatgattaagatttataatcagtttaaggaagattatgcttcataatctgggtaagcctgattcaatctgtggaagaccttcagtgcagaactgaggctgctctgagaaagaagaaattctccctgtggattgcagcttgagctcatgacgaagtcctagcttggacttccagatgaccctccctatagatctcggacttgcctagccagctcccacaaaagcatacgccattttcttgcaatgagtctttctttcttttttttgaagttcctttttttaaacttttattttaagttcaggggtacaagtataggtttgttacataggtaaatttgtgtcacgagggtttgttgtacagattgtttcgtcacccaggtattaagcctagtacccattagttattttttcctgatattctccctcctcccaccctcctaccctccaaaatgccctagtgtgtgttgttcccctctatgtgtccatgtgttctcatcatttagctccctcttagaagtgtcaacatgtggtatgtggttttctgttcctgtgtcagtttgctaaggataatggcctccagctccattcatgtccctgcaaaggacatgatctcattcttttttatggctgcatagtagttcattgagtatatgtaccatattttctttacccactctatcattgatgggcatttaggttgattccatgtctttgctattgtgaatagttgaatctttcaatacatacatcctacagacttgttttttccagtggaaacttgactgactacatcagtttcttttggttacggttttcatggtatgtcttttttcatccttctacacacaacctcccctatatttatcttttatgtagatctcttataaacaacgtatagctacactttcccccagtcttactatgctggtattttaactgtagcatttaattcacttgtgcttaatgtgattcttagactgtatttgagtctaaatacagaatcttatacttgtattctacatgttctatccatcctttttttctttaatctcttatttcttgtcttctctggtttgactgaataatgtttctatcaccttttatacttcctctagttcacaggtggtaaacttggcttcgaatctttaagtaaatttcctcgagattacaataataaattatccaaatgtaacattcatcataacatttaattttctctggaaaaatataaagactttatgtaatataaattctatttacactcttctgaactttatgttattatagtttctgggctatataatattggtatttcaatattacatttgatgtttgacccctctacaaaccatcatttttacaacaagtatttgtttcattttgctcacatatttgctactttcctaggttttcattttttttggatctcaaaaatctaatctgggatcactttcctaatacctgaattatatgttttagaatttatttgagaaatcttttctttattaacactcacatattttggttttccttaaaatatctatatttcactttcagtcttaaaatgtgttttcattgagtaggctttctaaaacaacatttatttctcttaagccatcaaagacatctttctattgcatttagccttccaatattgctcctaaaaaagtcagctgtcagtctaattgtggttttttgcttgtttgtttgttttgttttgctttttctgagttggagtctcgctctgttgcccaggctggagtgcagtgatgcaatctcagctcacttcaacctccacctcccaggttcaagcaattctcctgcttcaacctgcagaagtacctgggattacaggcaagtgccaccacaccgagctaatttttgtattttagtagagatggggtttcaccatgttggccagaccagtctcgaactcctgacctccagtgatccacccacctcagcctcccaaagtgctgggattacaggcgtgagccactgctaactgtggtcttttaagtgtaatctatctttttatttttcatggctactcttaagaattttccttaatagttggtcttcattaaatgctttcttcaatttcactggaatagtggagactgggatttgtaagaggaagctgtggaaatggacatggggtattggtgactggtgaggaattgatctggggaaatctggatggacaagatcatgtagagagccttgagcagaaagatgatggatggaaaccttattttggggagtcgtgaagagttctgaacagggggtgacacagacacctggtgctgtggcctctgggcctactccttttcagccttagaagaaattgccagcagaaaccgtctgttaaaacagctaatcaaagccgggtgcggtggctcatgcctgtaatctcagcactttgggaggccgaggagggcagatcacgaggtcaggagatcaagaccatcctggctaacacggtgaaaccccgtctctactaaaaatacaaaaaattagccgggtgtggtggtgggtgcctgtagtcccagctacttgggaggctgaggcaggagaatggtgtgaacccagggggcgaagcttgcactgagccaagatcgcaccactgcactccagcctgggagatacagcaagactccatctcagaaaaaaaaaaaaaaaaaaaaagctagccaaagccagatacaaggcattcatttacaaaaatatacagactttatgaaaacctttgtgtcagggcctttgttagctgttttacagctaacaaagctgtatgttagctgtatgctttctttgacctttcacaataatctggttagatggaaattatttccctgccttacagagcagggacataaagcgacttgctcaatagctggcatagatggagttgaactcagttctcttggacagaagtcctgtggtctgccatatatacgaaggtatttatatagtccatttacaacaaaaacattaattttaaaagaattggacacagtgttatgggctaaattgttcccttctaaaattcatatgttggaagtcctaaatctcaatatctcagaaggttactgtatttggagggtctttaaatagttaatttatttaaattaggtcatggggaggccctaatccaatatgactagtgtctttataagaagagaagattaggacacaaacacactcagaggaaagaccatgtgaagacacaaggaggagacagccatctacaagccaacaagagaggccttagaagggaccaaccctgataacaccttgttctcagacctctaacatctgaaactatacgaaaataaagttctgtgtttatgtcactcggtttgtggtacattgctgtggcagccctagtaaccaatacactgagaggtaccatgttctctccaatcaaggttatggctttggacaattcctcacttgtgtatcttgatttctgagtactcagtgtcggtgacctttggttcctgaggttgcaccttgtggaagtgtaggacagcgtagtggagctcctgctcatcttctgagatggggccagcctcagcagggtggtctgaaactatgcctgtctggaactggtgctgatgacccttaatggaagaaaagaaaagattcagggctggacaataggttctcaaagaaagcagccaaggatcagaaagggagtagaactgatggaactttattatttatccattcatttattattttattttatttcattttattttattttatttttgagatggggtctcgctctgttgtccaggctggagtgcagcggcatgatcacggctcaggcagccttgaacacctgggttcgaatgaaccttctgcttcagcctcctgtgtagctgggactacaggcatgcaccccacctggctaatttttgtagagatggagttctactatgttgcccaggctggtcttgaaccctgggctcaaggaatccacccaccttggcttcctaaagtgctgggattacaagcatgagccaccacatccaccgcattcatttattttaaaatatttaataattaagattggcaagcccttagtgagtgtttacattaatcagtcatattctattctcaaaaaatgctttgcagtggattccatgattacattcatcttacaaacgggaacactaaggctaagagaggctccacatgttgcctatagacacacatctatataaatgcaccactgagaaggactcagaaccagcttattgttgtgtaggtcatgtgacatgtgctagatgttaagccatgaagaaagcagacacagtcccagatagtaggcagtgtggttttctatgagatgcagttagttaaaaacaggaaacaaaatcacttttttaattcatgatagcagatattttgaaatataaagcaggggcaggagtggcatatctgattcctagacaggtactggaggacagaacagagaccgggtcctgcagtacaggccaccggacgccctctcctgtaccttctctttctaatgcccctgaaaacttgaaagtaaagcatggtaaagaaattatgtaatgattcccaacaaagtggggatttaacacacactaagtgtgttatatctccaaataaaccaagaggcaatacaagaaattatggaatgagcaaataagaaaaagtgggaaatctctggggaaacaaaatattttatactggagtgtgtgtgtgtgtatatgtgtgtgtgtgtgttcagggaggcattggtgacagtgcgtgaatggctacagaaatgagatttatgttccactcatgtctttcctccatcattgggataatatattcctgcctgcattcttgctacacaaatcagtggcaaagtccgagactaaaggtgtgaatttctgcaggagaaatgacagatcagcacaaaagccctactgaatgaagaaaataacaggtggaaattgcctctccctgggcttcccctggccaccttcccccatccacacatcccagacttttggaagacagtctaggtattacctcccccagcaccaatttttcctgagggtctgaacaacaggaatcatgacttgaattattcttggtcagttctcactcaggctatggtagagtaactggcaccctcccagcataattagaaaactatacatagtatgtaaaatatgtgtttcacaaggaaaacaggcagacaggactgtgacatctgaaagaaaggaaaccaatgaggtgagtctcatgatcaaatgacaatttccaaactgcagtacgtggaggataaattcaagcagaacacaagagtcttatgaaactgtggaggcagcaactgcagttcaagtgggaatgatgtgggtggaatttgtagagcagagtacagagagaaaaaactacacagagaaagaactccaaaaaatatgcatagaggtccccttgaatctttggctgaatactaagctgtatgcacagagtgaaaggctgaaagcctgggtacgtgctgctggagaaggaacagctatgagaaagctggaatgaaggcaaatataaactcaccctgccaaagcttttgtaaaaatctttgaatggtcaagacaatccactaataaattaactgcattcgagaacaaagctcaacaatttttaaaggaagattaaaatatccggataatcaacaatgtaacacgatgtccagtatgccaccaaaatcactacctatgcgaagaagctgtggaatgtaagcaatgaaaagtatatcagtaaatagaaacatatcaccaaatgatggaattagcagaaaagaagattaaaaacggctataaatacacatattcaaagacttaggccaggtatggttgttcatgcctgtaatcccagaactttgggaggctgaggtgggcagattgatttgagctcaggagttcgagaccagcctgggcaacatggtgaaatcccatctctaatccctaacccacaaaaaaattagccagatatggtggctcacgcctgtagtcccgactactcgggagtctgaggctggagaattgcttgagcccaggaagtggaggttgcagtgaactgagaacatgccattgcactccaccctgggcaaaagagtgaaaccctctctcaacaataacaaaaacttaaaggaaaacagaacataataaggaaatgaaaactataaagaactgggctgggtgtggtggctcacacctgtaagtccagcaatttgggaagccgaggcaggagtactgcttgagcccatgagtttgagaccagcctgggcaacatggtgagaccctgtctttacaaaaatttgtttaaaaaattagccaggcgcagtggtgcatgcctgtagtcatagctatttgaaaggctgaggcaggaggatcacttgagcctaggaggtcgaaactgcagtgagccatgttcatgccactgcactccagcctgggcgacagagtgagatcctgtctcaggaaaaaaaaaataaactgaattgaatttctagagatgaaaaatggcaatatctaaaaagaaaagctaatagcagattaggtacggcagaagaaaatagcaatgaactaaaaaacgtagcaataaaaactttccaaactgaggcacaaagaaaacacaaaaacgaaaaataaataagcacagcttcattggcctgtgggacaatatcaagcattctgacacaggtgcaactgggatcccagaaaggggaagggagttaaagaattatggaaaaaacaatgattaaaatgttttcacaataccaagtcatatatccaacaatatctgcaaataccaagaaagataaaaacaaagaaaaccacacctaggcatgtcataatcctattgctgaaaaccaacaaggaaaagaaatgtgccctagggaagccagatgattggacaaccctgctagaggataaaagtagtaactctcctctcagcagtctgatggaactgggtaaaccaaatttgatgttccaggtctgataaggagaggcccagtaaacacctcaaaccttccgttaggactcaagaagggttacagattaaaagtaagggtccgctgggcacagtggctcacgcccgtaatcccagcactttgggcggctgaggcaggtggatcacgaggtcaggagatggagaccatcctggctaacacggtgaaagcccgtctgtactaaaagtacaaaaaaaaattagctgggcgcggtggcgggcacctgtaatcccagccactcgggaggctgaggcaggagaatggcgtgaacccaggaagcggagcttgccgtgagctgagatcgtgccactgcactccagcctgggtgacagagtgagactccatctcaaaaaaaaaaagtagtaatattttaaaactatcaaaaaggcaaaaaagggagataaatataaaaggacaaatataaatataaagcagagcaatctggtagaattaaactgagccaaatcaataatcacattaaatataaatggtctaaacactccaattaaaaggaagatattggcagacttgataaaataggtagaataaatgtgatatctgtaagacagacacaatacatatgaaggcacacatgtgttaaaagtaagaggagggaaaatgcataacaaacaagcactaatattaagaacactagagtggtaatattaaatcagacagtgtattttaggaaaagaaatattaccagaaataaagacatttcataatgataaacaagtcaattcattacaagatataaaaatcctaagtgcatatgcaaccaatcacagagcatgatttaacaaaataaattgtaaaaataagcagacagagaatcactaaggatatagaaggattgaacactagtgtaaaataacttgacctgattgacatttataaaatactacatccagtatcttcagaaaacacattctttgcaattgcacatgtaacattcaccatggtagactgatttttcatgtacttatactaccagttactgagataagagtttttaaaaaatcgactatggagtgtgcgccactctaatggagaggagatagagtggcaaataaacattagctcgccaactagaccatccagaaggacacgttgacattcatcaaggaagcaacatgacccggagagcagagaagaatgagacaaggcagctccccaggattggcatggagccaagggaggctccccacgatggggaaacagtgagcaagtgacagcccccaaggacccacacttctgccatggacctttgcagtcctgggcatgagagatcccctgaagcctccagactgacatggagagctgtgcggagtctgggcagggccactgctcaggcccatgtggagccccaagggccttggacctatgagcagctgggcaccaggtgtcatagcttcaccaacaagagaggccaggttctctcacatgctctcagggtagggaccacatttatggtgctgaggagctgacagattgcatacctcacctctgctacagctcgccagagaaagcccactggcctgggaccccagcatagccacctcacccctgcctgagcacttgggccagtagcagctctcgacttctctgggacagggctcccagaggtaacagacaagtctgccattttttctgccgccacagctcccactcctactcccccgaggctggagaaggagaaaagagcataaggactatcactggcctccaacacaccggaactgctttatggaaaagcagccagaccgtatcagtgtgggtccctgcccctgttattcctgactgagaaggacatcctgacccgggcccccagcacagctgccctgcccccacctgagttggtggcagttctgtgtttctctgaggaggatatcccagggtcaacccacaggctctttgccattgccactgcagtggtactgcccttgatgtcttcaggctgggaaaagaataaagaccttgatcactttgctggcacctccaacacactacaagcaccatacagaaaggagcccagtctcgcttccctgtgggacccctactccctgctcttcaccaggcagggcccctggctggggcctgcagcacagcggccccacccctagatgaacgttcccattggcagtggctctgtggctttctggggtggagctctcagagcagctggcagcccctctgccattgctgctgcagccatgctgcccttgctgccctcaggctagggaaggaacaaagagcctgatttatttggtggaacctccagcatgccacagctgcactacagagaggagcccagtctctcttccctgtgagcctccaaccgttactcttcaccaggtaagtccccctgcttgggcccacagcacagctgcctcaacccagggtaattattccaattggcagcagctctgcattcctctaggatgaagccccaagagacaaggaaaaagccctctaccactggcacttccaaggtccctgcccctgctgctccaagctggggaggaaacaaaatgcctgggctcaccacggggctgtagtgtgcagcctgagtgccaagtcaagatctgtagccagcacttgagtgagagaggagcccacactctcagagcactaggagggagcatggctgcaaatgtgaggaactacagaggattcatgtggctgaacaagagcctacctgccagccattatgcttaagcaccacctattggatcacatccaaacttcaacaccaaaaatactttgctaatataccccactgtgaaactaaggacaagaatttagcaacaaataaagatcgtgcacaaagcgttggccttctgaaaacgtccagaaacaaagccaactgactatactcaaatgacagcacaagtaagggaacatgagcccacataaatgagaaagaaccagtgcaaggactctggcaaatctaaaagccagagtgtcttcttacctcataatgaccacactagttccccagcaaaagttcttaaccagaatgaaatggataaaataacagacgaaaaattcagaatctggatgacaatcaagattattgagattcaggagaaagtagaaacccattccagggaatcaaaggaatccagtaaaacaattgaagagatgaaagatgaaatagccaccttaagaaagaaccaaactgagctgatagagctgaataactcactataaaaatttcataacacaatcagaagtattaacagcagaataaaccaagctgaggaaagaatatcagagcccaaagactggttcttcaaattaactcaggcagacaaaagaacaaagaattttagaaatgaacaaaacctccaaaaactgtgggattatgtaaagagaccaaatctacaactcattggcatccctgaaagagaaggagagagagcaagcaacttgaacaacgtattggaggatattgtccacaaaaatgtccccaacctctctagagaggtcagcatgcagattcaggaaattcagagaaccttggtaagataatatataagacaaccattcccaagacacgcagtcatcaggttctccaaggtcaatgccaaagaaaaaatattacaggcagctagagatgcctgtaatattgtaatagtgatgagcagtaatgactttgggttgatttgggctgtctactctagggcttgtgtctaccacattccttgtacttaatgcacctgacacagactaagttttgttcatttctttttctcaataatcaatgccataagaaaagactaatattccaggaaatatgataatctgacatatgaggagcataaatacccccagcaaattaactggagtacgtatttcatcagaactattagattcagttccaaatgttactattttaaattattgaaatcaatactttttaaattattactgagtcaaaaatttaaaatgtcacatgtggaaccgcagggaatgtcaggtgttaatgaagaaatgcctcagggtccttacttagggcagcattcaaaagggataatgctgaatggaaattaaggtctctgtcactcaccctggagcctgagaccatgacggggttcacatcatccgtgttttgcactggctgggctgctttcttccttctagtcttcactctgagggaacagccctaagcctttcagcctggttatttggagcctctttccccaaaagaaaaccatctccccactccctatggagagtacagaagtaattaagaggtccaggtgctcacatgagcccaagagttggaccacggtttcaaagagaccccttgcttggttcagctggtcaacggggtaattcacaccaccactaccctccctttcctcactctcgactttcccaatcaccccattttcctccactcaggttttctgagattctgccacctgtgtgcccttcccacatgaagtctttctgtgcctccctggagcccactctcacctgaagatgaagcaaacacagaggaaaaccagggttgtgatgctagctccccagactgctcccaggacaccaccagccctgccttctggtttccctataatttgaattttaagtgaactccagttctaattccaggacatcctcccaacagccattcctctccaccttccactaatgtgaccacccccatccaggactcagtcactcaccatttcactgccctgtgaacccggaaccagcctcttctctctccatgactcccccttcccccaactgcaagactgaggacgttgtgcccccagccactcttgtctgggccttggaaacatcttctccaagcttcatttctctggagcagttaggggttgaattatgtctccccacaattcctattttgaagtcctaacccccagcacctcagagcatgacctgatttggagaagggtcatagctgatgtaattagttataatgaggtgttcctggatcagggtgagccctaatccaatatgactgttgtccttataaaaaggggaaaatgtgggtcgggtgcagtggttcacacctgtaatcccatcattttgggaggccaaggctagcagatcaccaggtcaggagatcgagaccatcctggccaacatggtgaaaccctgtctctactcaaaatataaaaattagctgggcatggtggtgggcgcctgtagtgccagctactcgggaggctgaggcaggagaatctcttgaacccgggaggtggaggttgcatatgtcagattaccatgttgcagtgagccaagatcgcaccattgcattccagcctggcaacagagtgagaccctctctcaaaaaaaaaaaaaaaaagggaaaatgtggacacagacgcacatgtggacacagacaccaccatgtgaagattaagtcagaggtcgaggcaatgcttctttaagcctaggaacgccaaagactcccaggaaaccaccagaagccagggaaggagcatggaagagattctctcacagcctcaaaaggaaccaactctaacaccatacatgatcttggacttctgaccttgagaaccgtgagacaataaatccctattgtttaagtcgtgcactttgaattactttgttatggcagccctagcaaactcatacaaggacccaggcttctcttcccccaattgtcacctcttagcagactcctgacctggcagcagctgggacagagctgctctgggatgttctgggcctcaaagctgagcctgagacttgagctgaatccctggcaggggctcagggagctgttgaccaagggtccggctggctgggggtgactgtgaaggagccatggctgctgttcccatccctccagaatctcctccccaagctgccagtgcagggaggagccactgcagtgtggactctaagcctcccagaggtaggagggtcccagcagttgtgaggggtctggggagggaggacaggacttagcaggggcctcttctctgaatactatggagctctcgcccagctgcccacactctcgcgcacctccccccacactcacaatgcacaaagagactcagagagatttgcagggagcccagaggatgctgagcacggcaggtgaaatctccttcttctgcagaccctacttgaggcagctccaggaccccggtattggagatgggggtggcgttcagggcggggaagccctggaaccagctcaggtgtgcaggggggttgccgtcagcatcacagagcagccgcagagcctggccctccaggacagggagggacgaggtgttttgcaggattttgaaggctttggggagagaggtgtagagagttagagatggggtataggggcaaagcactggtgtccctctcctcctgtggggtccacactagctctgaggaggagactagtaaagtgggggcctcaggtcttcagaaaagcccagaccatttccctggagctgcccaggctgtcctgcagagagtggagcaagggctgcggacagcgtcgtggcagacaagtgccattcctggaccatggagacgcctgaggcagtaggaaaacaagcaagagagaagagggagtgcgaggggtgtggcagctcctgccgaagaggcgacaaaggctgggggtgagcaaagattcagtccaggtctttgaagtctatggaggccttagtcctggcttctcatattgatccccgttagtccccactctgcttccatctggccctggagagaacaggactggctggttcctacctgcgctgtttccttggaagatgctgatggccactttctgtggagcatctggggtggaaagaggtggccgcctcaacatccctgaggagggatggtaggcatggggccttcccctcaggagccatgaaaacagggaaaggggctctcctctttggcaaccaggtccccaactttaagctctggctcagccctgccctgtccccccacaccctcagggacccgggcgtcctggcccagcactcacaggagacattgagctggatggttctctccatggtcacaccggctccagggaacgtcacctgacaggtgaggttggtgctgtggtcctggggccgtggggtgattgtgagcaccgaggactgggtggtcctggggcccagggaggtgggggcagctgacatccaggagaagatggggggcgtcccctgctcacagacccagggcacagagcaggtcagattgctgggatggccagactccagggtccctgggatggagatgttgggcctgtgggtcagggctggtgaggagatggggacgcaggatcaggatggaggtctgaggtttcacccagggggaagcccagtctctggtccagctccttctctgagcccaacatgcttaattgtacccgcctcccaagacggggctcccgtcccagccctgccctacggcccccatgaccttcccctgtggctagtcctggagctggttccttacccatcacacgcacagagagcttggaagatgtataaccgtatttcatccatttggacttcaaccgaaagaagtatgcagcattgtccctcctccgggcatctctgatgctcagggagcagttcttccttctgggatcccagaggaggtggaatcggccccgggtctcctcctgcacttcttcgtctgggtcgtttgtggccactggaacatcagccccttccaggaaccagtagccataaccatagtacgaggctggaagggtagtgggcaatctgcagggtacgaggacgcacagaccctcctgcaccgtcagtgactctggcccctccagctggaatctccgctcctgagccagggcccctatggagacatgagggtcagctcggcccagccccacggcacctctcccctggcccactcacctgcccacagcaggggcagcagcagcggtagcatctctgaggcggaggcttcctgggctccctgcatgagcagagaaggggaagggagtggaggggaaggactgcggggaggaacgggtggctggggaggagcgcgtgatctcggctgttcacagaagaggaactgcgaagccacaagccctcggagctccactccctctgcacagagcagacggaaactttgagacccagagacctgcccaaagaagagcagaggagaagagactgtgtcccgcctcccacctcggggcttcctgtgagcaacagagcccggaccagggcctcccggggcatctgaggaatgcgaaacctgtgtccaaggccctgcccacctgaggtgcttttctgtgcaccactgtttacacctgggagctggtcactcctggccccagagagtcacagcctcatcccacgccatgagaaagtcagtcctgcaggatataggattctgtagggtctgtgggagtgtctgggacagtgaaaggaagaagggtcccaggtgcagtgtgggtgatagccactcattcattcactcattcattcattcattcattcattcaccaaagacatagtgagcatctgtatgtaggtcgggctggagaagagatgccagggacctggtccctacccttgagatgatccccatccatagcttcccatcctcagcacacaccctcactatctagctttagagctgtggacactggtgagtttgccaagtgacacagtagaatgccagatattttttaaaacatgagtatggaggtttttccttgacagctagtacgctgatttacaaaatttcaatgacatctccaaaataagaaccatgcaacatcttcatgtaaatcaaaaaggacacatattttatgaactgcagtgcagaagaaacttcttttgaattaatgttgccactcagtgcagtgtggactggagagatttttttttaggtcctcatcatagagattagcaatttctttcctgtgaaaaatctgcttctcacagttaaatgtggcacaaaagacatatttctggacaacgtgagcagaatatcctgacaaaattaaaatttttaggtctagctcacatggttttctattttcctctgtgcagtatgcatctggcaaatctctaatacctatgaggtattagaatttgccaccatatatttgtaaatttttttatttctacaaacttaaggagtagatgtaaaatttttttgcatgtatataatgcgtaatgattatgtcaggatatttagagtgtccgtcacgtgagtgcaatacattcttgttaactaaaatcacactattctgctctctaacgctgaatttattccttttaactgtatgtttgtagcacttcactcacttctcttcatcttctgtcctcccccatctgaccctttccagtctctgttgtctatctttctactgtccacctccatgtgataatatttttttagctcccacatgtaagtgagaacatgcaacatttgtctttttgtgtctgacttatttcaatttagataatgaattctagtcccatccatgttgctgcaaatgacacgatttcattcttttttatggccaaatagcatgtatactatattttctttatccattcatctgttaattgacacttaggttggttccatatctctgatattgtgaatagtgcagcaaaaatcatgtgaatgcaggtatctctttgatgtatttctttctttcccttcgggtagatacccagtagtgggattgcttgagtgatcgaatagtaattctatttttagttcctgagaaatgtccatagtgttttcaaaagtggctgtactagtttaaattcccaccaacagtacagaagagttatctttctcctcatccttgccaaaatctgttattttttgtttttttagtaatagtcattctgactgggtaagacggtatctcattttggtttagatgtgcacttctctgatgattagtgacgctgaccattttgtcgtattggctgttcttatgtattctttgagaactgtctattcctgtcctttgcccactttttacttggattatttgctttttcctgttgagttgtttgagttccttgtatagtctggatattagtctcctgtcagaagaatagtttgcgaatattttctccaattcaacaggttgtttcttcactctaattatttcttttcctggcagaagctttttgtttattaagtcccatttgtttatttttgtttttgttgcctgtgcttttcagaacttagtcataatttctgactcttctgaccaatgttcaaaagagttttccctaggttttcttgtagctgttttttttttttatagttttgggtcttacatttaagtgtatgattcattttgagtttttttttaatatggtgagagagaagaatccagtttcattcttttgtgtgtgggtatacaattttcccagcaccatttattgaagaaggtgtcctttcctcaatataagttcttgtcagttttgttgacaatcaattggctgtatacatgtggccttatttctgggttatattccattggtctatgtatctatttctataccaatatcatgctgttttggttattatagccttgtaatatactttgaagtcaggtaaagtgataccaccagctttgttcttttttctccggatagctttggctattcaggttctttttggatccatatgaattttataattgttttttacaattctgtgaagactgacattggtattttcatatggattacattaaatctttagattgctatagaccagtgtgggcttcttaactatcttaattcttccagtcatgagtatgggatgtttttccatttgtttgtgtcatcttcaatttctttcatcagtgttttttagtttttcctgtatagattttcacctggtaggtcattaagagcatattgtttaatttccatacatttgtcttgtttccagagttcctcttggtgctgacttgttgttttgttccattgtggtctgagtatacattgagtaaatattgattttttttttaatttatagagacttatttcgtagccgaatatatggtgtatcctggagaatgtttcatgtactgatgaaaagaatatgtattctgcagttgttgggtagaagttctgtaaaagtctgttagttccatttggtctatagtgtagtttaaatgtgatgtttgtttgttgattttctgtctaagtgatctgtcttactgagaatagggtggtgaagcttcccaccattattgtattgcattctatctctctctttagatctagtaatatttgctttatagatatggctgctccattgctgggtgcatatatatttagaattgttatatcctcttgctgggttgatcccttcatcattatataatgaccttctttgtctttttctactgctcttgacctaaggtctgttttatctaagtatagttactgctgcttactattggtttccatttgtgtggaatatctttctccatccttttacttttggtctatatgtgtcttttcttaaggtgtgtttctttaagctgcacactgttgagtcatttttaaaatccattcagccattctatatcttttaagaggatactttaatccatttacatacatggttattattgatttgtgaggctttctttctgtcaggttattaaacattttcttgttttaaacattcgttgtttctttccttttatcttattgtttgtccttgtgatttggtggatttctgtagtggtaccatttgagtcctttctagttctcatttgcatgattgctttaccagtgaattttttactttcatatgttttcgtgatgataaaatcatccttttgcttccaggtttaggactcctttgagtattttttccaaggctggtctagtggtaataaatttcatcagcatttgtttgtcttgggatgaatctatttctcttttatttatgaagaatagtttctttgcatgttctgtggtggcagttattttttcttttagcacttagaatatatcagttccttcttttctggtgtgtaaggtttctactgagaaatctgctcttagtcaaatggaatttcctttagaggtagctagatgcttttctcttgctatttgtagaatttgctctttaactttgacttcacacagtctgactataatgtgccaaggagaagaccttttgcattggggatctgcccggggatcattgggccttctgtatctctatacctaaatcttttgttagacttgggatgttttcatgtattattttgctgagtaggttttccaatatttctttgttttttcacccttagagataccagtaatttataaattccattgctttttgttgtcctaaatgttattaaggctatgctcattattttttgtacttttccctttatttttgtctgactagattatttcaaaaaacctgtcttcaagttccaagattcttctgccagatttagtctattattgaacttttcaaatgtgttttgcatttccttcaattaactattcagttccagaatttatatttggttattttaaaaaatatatatctctttgatcattttctcatttataccctgaattgtttttctggtttccatagtattgattttcagaattctgttgtatctcactgagcttctttaacatcaatattttgaattctttgtctggaatttcaaaaatttctttgtgattaagatctatttctgcagaattcttgtgttcctttccttgctgtttcatgtttcctgtgtccttatgttaaaatctgtgcatctagtataacagtagcttcttcctattttttaatttactttcatagaggacatttcttttttttttcatggtccaagcatgtggtgatttttattaagaataactttggttctaagaattccactctcaattctttaatgctttctgttaaaaacaattatacaacggcaaatacaaaaaatattaaattatgaaaaccaatccattaaggctccctttatatataatatacactcaaacaagtcaagatttttcagagtagaagaataaaatcaactgttatagcttagaaagcaacactactactatgagactataaaacattgaactactttaagaaaatcacaatgtggaaaaatggagcctttttttttatcaaaaagtggctcaaagcacaaaactgctcagatgttcaagggtcccaggggtttgggctgcacagtgttaaggggagagaggagactgacagcctgtttgaatcaggcttgtgagcccagcccatctgacaatttcaaagagcttctctgcctaaacattccaccgtttagtataagacaccactttacgctatttacaagtctccttttggccagcctttgtattattaattacaaataattctgcagatttgagtgagattaggaaagaaatgctttcttaattaactttttttttcagtgaacaattaattctagttaagctctaggaacagaattggtccttataaaggagcctatcagggcccttgagaatacgatcaagtggcagaattgctttgagaatacggatttcaagatctgacatctagttagataaaaagatatgagccagtcccgaatagaagacatttcttgaaaatgtatctacgttgcttgtttggtggggtgctttggctttgattctgtgtatgtgcagtagtgtactttctgtatatttctttgactgtaaacagcattagtgatatgtgtgatttctttggctagttggagcatggttattagtggagaatatggtaaagttgtgctagggacagggatgctgagcgggagagtcttcaggtccccagctttggcatcagtgggctgagcatctatctttttgccccagggtggtatatgctggcttctctgttggcagttaccagtgggttgattcttgggctttcaggttgctcatttggatgctcatagtagcaccaatggatcaagcaattgtgtgggttttcaggcccctgggcagccagcatggcattgacaatagcaatagcatgggcaagatgattctatgagtcccaagtgatgtgcattaatgttggtgctggctgcaatgggctggacaagacagcctttggacccacagttggcacttgcaggtaggcgccaggcaaggtagtagcagccagaagtttagatccaacctcaagcccccagaagaagtgctcaggtgcccaaggtagtgaattgggtcgagcaatccgcaggaccctgggctatgtgctctgtctcagagcgggagaggtgaggtgaagctgagctagatgggtttgtgctcaggtcctcaatgttgacagcaggcactcgtcattgtgggcagggtcagagcaatcgtcgggtcccaggcagaggattactgaagagggtagggccatcttgagtggtcatagcctgggtcagttgaaggtggcggaagaacatatgtccctttcacactccagtcctggaggggctcgacaccccccctcaccctggttgctggagctcccatctggcttgcaaacaagttccaatggcaatttgtgcccctcttgcatccttgtctcagatcctggcagtgcttgcttcacagccacagctgaccaaaccttgctcactttctagccccacctgcaggagcactcctggttcgatctcctgtcccagcagcaatagcttgagtttctgtaatgccccagtttcagtgtctctgggtccttgaacagcatacaatttccagaggacaagcttgaaaatgcttaagtgtcagaaaggtgtggaacccagcaggagttcccttcccggagtagttctgtccaatggtgtcctgactctctatgttagtttcatagggttgagtgcttctcccttggccaggattgctgaattccgccatggagatgtggatgactggaaatccctaactcagtcctttgtgcatgggaagtcactcccagctcccagccaatcccagccagggaggctgcctcttttccttctccttccctgtttttgatgtcctctgccacttctctggtggattccaggattttcccttggataatgtaattcgactgtgactgtctatacattactctggttcttctaagtggaggaggcaggcatgaaatgcttctagttagtcgtcttgaactacactacccttatttgaacaatttttaaacacagtagtatctagataaatattcattcatccttactaaaataagagagctagttttacctttatttgatatataagtaattgagccaccaataagtataatacctgtcctagattatcttttaagtaaaaatgtggcacataatagaaaattcaacgaaatttgttttaatagtaaataaagttatatcatgctcatagactggaaggttaaatatgaagttgtgatttctcattatgtttctttaatgaactttattaggtataattttatagtttaatttggaatttattttgcctaaaagagttccagtgagagaaacattttgacataacagtgaaaacaaaatccctcataccttaaaattaaaatttttggatatttgtaccataagcttgcccggcctgtaagaagcatcatttctactagagatttctcaccaagaataaattaggtcattttcatgaggaaaacaaacaaaactcttagtcataactttgatccatgttcaatctcctcaacaaagttttgtgtgcattatctctgtactagagatgtgaatttttaaaattagcaacacatatttttaatatacctaaagatatttccttattccttccaataattatcaataaaaggaaaggcaggtatacgtattattattattagatctatcagcttaattttaatttctaacttatatctttatctaaattgctcagtttaataaaaataatttaatgggttaagacactgccttcaactgggttttagtttagagcaggagacagaccctacgtgaatatttaacgttgcatctgggcactttttctgacctatgccagtttgccaaccagtgtttgtccaacatacaaagataggctgcatatactcagaaactgaattactgagatttcaacaatatacaaaagtcatttcatatgctcaaactttccatttattctcttatttaaggaaaagtgtgcattgttaacagaaaaacaggttcttgtgccagcaggctagtaaatctcataatttcattaaaaacactttgggtcactttgtacactattaatgggactgtacgttagcacagccattatggaaagcaggaggtttgtcctcccaaaattaaaaatggaactaccatatgatccagaaatcccatttatgggtatctattgaaagaaaacaaaagagacatttgtactcccatgtttaccaaagtactatccacaatagtcaagatatggaatcaacctaagtgtccatcaatgggtgaatggataaagaaaatgtggcatgtatacgcaagagaatattattcagctttgaaaagaaagaaaattttgtcacttgcaacaacatggatgaacctggaggacaatatgccaagtgaaataagccaggcacggaaaggcaaatacttcgattctgcttatatgaggaatctgtagaagtcaatttcataaaagcagaggctagaaccctggtgatcaggggtggaggttggagacaatgaagagatgttagtcagagggtaccaagtttcaggtagacaagaggaatctggaaatctcctgtactgcatggtgactatagctaataatactgtatcatatatttcaatactgctaagatagtaaatttccaatgttctcatcacaaaacaaaacaaatattgctggatacaaagcaatccttttgatgagtataaggtgttactttaaagtgcaaaggggttgataagtgtgagatggcaatgcatatattagcttatttcttcattacacaatgtacacatattttaaagcattatgttacatatcataaatatacacaattttatttgtctattaaaatagaataatgataaaacacaaaggaaatgtccacaaaacatcacattgtatgctgtaaataaatacaatatttatttttaattacacctcaataaggctggaaatattgctttgaaaaatccaaaggcaccaggcacgatggcgggtacctgctgttcccactattcaagaggcggctgtgaaggaggatagcttgagcccaggaattccaggctacagtgggctatgacaatcatacctatgaaaagccaccacactcccacctgggcaacaaagtaagaaccttctaaaaaatataataaacaaataaaattttaaaactccagatggaatccaaataaatttttggaattaataaacaaaaaaacctgccgttgcaaagatcatgagtgacaaaggtgcccacttctccgtctgtcctcacccctgtctctcctcatctgtggtcatcactttactccagctgtgcattgaaacatctccatcctggacccctctcctgagctccagacatttgcattcagctgtctccctcctatccccattcagatgtcagggggattctcagaattatcatcgcccctgaaagccacccgtctgcagtcctccatggacacagctctttccttccaggtgctcagaggaacattctggccccatccttgctcttcccttcccctccctgacaacactcattagaaaattctgtgagcctgaccttccactcacatccaaaaacacatccttaccccatcctgcctccctggctcagccccatgcctcctcctggatgacccagcagcaccttcccagcctccttggctgccgtgacacacgcggttctgctctgaccagagcagctgagggtcctgttagagtgagagtccagtcaagcctctgctctctccaaaggctccaggttcctgcgtagcctcagggccccacgcaggctgccctgtcatccccgctgctccctcctctgcctccttctgctctcagactggggctctggctgtgtctgcaatgcccaggcctgctgctgcctctgagcaatgcactcactgctccccttccctcttgctgggatgcttgtctctcattcagacacagagcctccctgctcagcaccttcatgcctttgctcacacaccacctcccctcattatcagataagaaacggttccccagtctatcttatgtttctttccctgcatgctttttctccaaacacagatctccaccccacatgctcttattttatttattatttcttttcatttgtacttttcctgtctctagaatgatagcttcttgaagacagagatttttttcgtgctgtgtctactgatgaacccctggtgccaataataatgctgacacataatggatgctcagtagagtcactgaagttagtcgcttcgtgtctatcaccaataatgcctctgctccactcagaaccaaataagaattacacacacacacatacacacacacatgcacacaacacacacacaaccctgagtgacattaagactgagcctgaaggacaattgggacctagattggcaggaatgggagggaagggcatttcaggagaaggaattacacacgcaaagtctcagagccacagagggcttggcctgcagagactttgggtggagagtctggccaggaacagactgtgcaaggcctccattccaggctgtggcattttccccttgttctccagcaccagagaggaaacacggctgctcagactgtggaggaactggatgaggaggcatctggaaacggagtctggagtctgtgttgggagagatggaggcaggaggtgaggagggctcagtgttcagggaggaggcgaggccccaggcatgaccagggccaagatggagaaaagggccccaggatgaaccctgcttagaaggagggacaagaattagtgatttgtgggatctggaggagggagggaggtgaaggtgaagacccatatcctggttctgactttagagatgggagccactatgtcatcagtaggatggggatcccaggagaagtgggttgggggaagaagatgggcagctcaacttaagccatactgagcagagcaatcctggaggccattgagggggaggtgtccagtgggatgttgaggatgagatgcccacaacccctgagagattagcccgtgacagggtctgcagcctccacgcctgctgctgcccttccttcctgcagaaactgacagtgagtaaaaagacaaaggcctgccagtgtggccggatcggggtgcagagggcagcagactcatctccccgtgccctgctaaggggcaggaggggactggggtggagagagcaggcctagcccccagaacctccctaatgagagcaggaacctcccagcccggacattcagtgaaagccgaggtcagacaacaattggtccatgtggaattctcgccacaattcagcctactgcctggccctcttgagccttcagattcctccagcactgggacctgggattcagcaccatgtcccctgtactccccacatctctccttggtccctggggcagcgctcagctgaggaagaggaagcagaggcagataggcaggatcttcacagccgcctccccgacagccaccaagaccacctccaccacaggccctgatttcaaaaagttttgccccggctgggagcagtggctcacacctgtatcccagcactttgggatgctgaggtgggcagatcacttgaggccaggagttcaagaccagcttggccaacatagcaaaaccctgtctctactaaaaatacaaaagaaattacctgggtgtggtggcacatgcctgtaatcccagctgctagggaggctgaggcacaagaattgcttgaacctgggaggcagaggttgcagtgagccaagatcacaccactgcagtccagcctgggcaacagagtgagactctatctcaaaaaataaaaaaaaaagttttgccccacaatgggtaggtgaatacatacacttttacccctccctgttgcgcgtgtaaccttgttcaccttcatgggttctccatggccatattttttcaaaattagaaagaacatatgacccaactattttgcatttaagaactgatttcacaggcatagatgtacacttgtggcagtagatacaagattatttattgcagtgttactgttggtaagataaaattagtgccatgatattccattaggcacaaaatcagagtccacatttttgatgccacgaaattggagtccatccacacagtggaatcacccacagtactggaggagagtaatgtcactctgatgtcactactgatgttaaaccatcactgagatccttcgggcaagcaaatcaaggcgcagcgcagccaggacagacactggcggattctggggaaggggacgggtgtctgagggtagattctactgtgcactctgaattctcacccatgtgactatatcatctgttcagaagaacttagatcaggactactggggagaataagaagatgagggaagaggagtattcagcaggtggggactcaaagcctggatctgctatgtgaatggcaccctgcccttgttatggggccagtgggagttgtgtgtggaagaggccaaggggagtgaggggaggatggggacaggtgctcaggtggccttggagactaacgatggggaagacctctgtttcacttacaagagggtctcaggttacgaagttgagtccaggaagaagcagtagcccagccctgccccaagctgcaggccctgctccctcagccccagggagggggctctgtcctacctgtgccgtctcctagagagacaccaatccttgggttccttagagcatctagaacaggaagagagaatttccctttctttggggtggagatgaggtaaaagtaggtactcctcccctaccccagaagccacaggaatgtcaaaagacagagcttgtgtccttctagttcccctgctcagccaggcctccaggacatagccacaaagtgtcccctgccctgaccctcctctaccccctacaccctcaggaacccaggcatcctggccccagcactcacaggagacactgagctggatggttctctctgtagtcacaccagctccagggaacttcacctgccaggtgaggttggtgctgtggtcctggggccatggggtgatcgtgagcactgaggagccgaaggtcctggagcccagatgcaacagggagacccccattcagaagaatgtggagggggctcctcccattcacaggcccagaacacatagcaggtaaggttcctggtgtgactggtaccccagaatccctgggatgaaaatgttgggcttgtgggtcagggctggtgaggagagagaggagcttggggaccctctgagtgttatcagcccaccccagggtcctttcacgctgtcggcatgccaccacctctagaaggagcagaaccttcattgctttatttctggtgtctgggcttttaacatacttgtcatattccaagagagcatcctacaagatatgaatgtttcctgaatggtttctcctttctgaagagtccgtgtgggctgggcgcagtggcttatccctgcaatcccagcactttgggaggccgaggcgggcagatcatgaggtcaagagattgagactatcctggccaacatggtgaaaccctgtcgctactaaaaatacaaaaattagcagggcatggtgacgggtgcctataatcccagctgcttgggaggctgaggcaggagaatctcttgaacccgggagacggaggttgcagtgagccaagattgtgcaactgcactccagcctggtgataaagtgagactccatcccaaaaaaaaaaaaaaaaaaagaaaagaaaagaaaaaaagagtccccgtgtgtgcctctgatgctcagggagaagttgctggtcttgaggtccctgggcaggaggaattggtcctgggtcctgccatgaagcatttgtcctggtcactggaggattgtggtctacatccacccctttctggaaccagcacaggtggagggttccatagtaagtccaggagtagggaaatttctgcagcctgaggacacacaggcccttctgcaccatcacaggttcctggaactgcagctgttccagaacctaagccaggagccctggagtgaggaaaagactaagccttgggctctggagcctcctgagtgggggctgctgtccccgcagcctatgcagggtcagcagcagtggcatctctgcctcatacccaggggcagacctctctgaaagggaagggaaagctacaggtgtgggacagcagaggaagcttgtggtgagaacaagaggtgaccagcccagtaaagggaacttcagacacacaatgagtccattgtaattaactctttaagaaaactgagttccatttctgcatgttgctcagacaaggcaagaggcttgccctaagtaaggcagcaacgaaggaccggagtccccaagtcctgcctcctggacttgtgcacaagtgactggagaaacaggtgccacctggccagttccccatgaatcacaggcgtgggacccccacagaggtcagtctcctagagatcagcaccagaggcatgaaagggtccacgtgaggtaagagcagcaacacttcattcattccatgtgtgcattcattctcaaacaaaagtaaaagagacagatttgcatcattcctgacgctcaactaactcaagtagtcctggaagacagaaacaatgatgggcttgagctttctccaaggacaatagggagtcatggaaggttctcatgcagaaaagggtcaccataatatatacatgtcagatagatccctccaaggccagactgcaggctaagggcctagagagaaagctgttgcgattgttcggtaaggaagaaccatgccttcaaggagagagtaatgtagtgaattcttagaattgcatgcgacctcagtgtccttttgaaataccagaagcggggctcagtcatccttaacaacttccagttctaaaccacactcaaatggctcaagctggtggccagagataagaacttagacaggcacagtgactcatgcccttcaaccaaccccagcactttgggaggctgagcgggtcgatctcttgagtggagttcaagacagcctgggtaatatagagggacctcatctctacaaaaaacaataggtaaataaaagaaccagcggcatctctcctgtaaaagcagacttgccttcctgctttttctgctgctacctttaagggaaccacagatatttacccatgaacttaaagtaaccacacccgattccctgagaggtactgccagttgccgtgtgcttttctttctcactctgcctgactcctcattcctgactcgggtgacccagggatggactgggtccccccactaattactgccccccctccactcattacaccctcattgcctggagtttataagtaaaaatctttaaacatatttcctagcttgatggtgcattgaacttgcaccctccacctgaagaactgtggctactctaggctgggtttccccccaggacacctgggagggtacaagggtggacttccagtgccagggaaatggtcaggcaggcataaagtgaacacgggtcagaaaagaaccacaggggcatctgtagcttaaacaagttgcccatgtgaggcacccatggtcatgggtcagacaaccaggcattagatcatcctccacgtaagagaaagatcctgtgaaatgtacgctgtagacaccacgtccagctctccttcatttcccattagggcagggtcatcagccactctggcactgaagccccagtttagctggggactctcaaaacaagtcaccttggtgattgaagaaagaagcaatttgagacattttcagaaagtggactttgcagggttggtggtggtgcatgacagagcaggagcaccatcatctcagactaacactgccactttaagttccagctccctttctagcctcgtgcatttcaaggaaatcacttatcttctgacaacaagcagccggaaagagcagacagtgaaacacagataagacagctcaggcataaagggatgtctgagggggaaaagtctcctgggtaaccaccaaacttcacactcatacaatgggccccagtaaaacagtgggccctaataaacacattccttcccctttaggtacactaagatagggaagctaaaagcagactcagggggtatgcctgcagctgcaggaagacgtatgggattagacacaaaactctccctcccaggtaagcaagacaaagagacacagaaacattctgagcctgtgataagctgtaccgccctgaatccttaaaaactcttagtcggtaaaagagagtgcctctgacctaactcagccagaagcccttctcaggtttagtctccaaaataaacctatctttaactgttcagctgttttttgtgtttccttcttctttctttaattcttataatgcgtgagagaggggagcatctgcagtggctcccagagccccgactcaagcagcagggacttgggggtgtcatggcagagagctggtgagatgaaccgtcagggcttgggggcaggtctgggctggagagggaggggtagggagtttcacaaagcctactggggttgtactcaggggaggtggatgtgttcaccaaggggaaacagaaggccccagtgggaggggtggggaacacacaatcttaagcttaattgtgggctggggaatggctgagatggcctggccagggaggtaggaggagaaggagctgcacattggtgacagcagtggtgagaattttatcagggatgggtgggaggggcagactgcagggggcagcggggtgagggggagtgggactcattgggatgtcttcagtcctctcctgtcggagctctgggcctccacttctgtcctgagcaagcagcaagcccaccttcatcacgaccccagagggaaggtttttttcctacctgtaccatttccttgggtggggccaatagccagattctgtggagaatctggcatctggcatctggaatggagaaagccaccattttctaccaccatgcggaggagtatggctgctctgcctctttggctaaatccatggaaagctgctgaggtggggactgctgtgatttctcctcccttctccagtcgagctcctgaccaggcgttgaatctctcaggccctgaacccttcctgtccatcctggcagccctcagccacccaggtgtcctggccaacatccaagggggatgctgagcctggtggtatgaggagctcagctgggctgtgagagagagctgtgcttcaaggtggcaggatcaccgattaaagcaacaatagaccaaactgaaagaatgaatcaagcctttaatcacagacagcagtgatagaggcaagagtctaaaccagagaatgcaccaactcttcttgtttcatttcctgccacccctctggaacagtgcacactgctggagggtcaggtggctcatggatcaacacagacataggggtcggggtcctctcactgaggagggagccctgaacaaaaggctcaggcagttccacagaccctgggaagggtgggggcatgagaagggctaggagtggaaaagaactgagtactgagtcagagtggggaaacgtgtcttcaaggttcctcctcctgccccccgcaaggtggtctcagcagaggcatctgtggaagacctctgtccaaggcctcagaaaacgaggcctagaaataaatgtaactgggatagaaatgcaaatatgcatagcgcatgactggccagaaaggtggggtccttgaccacaaccgagtgtgaagagggtggagtctcccagtgaggcctgccaggaaaagcctttgcaactgcctgtgatcgaacctgaaaagccacacctaggtttttaaccatgtgctggactcctcagatagttctacccatggatctaccgcttcctaggaaggtcacctggcatggaggcctgatgccacaatcttggaccctaggatacaggggtacactgaggacttgaagcgggggcttcagaaccccaggaagagaggtgcatcttccttcacaagcccctggcatggtgctgtttagactccaagatggctggctttaagcttaaagggatataaattatgggtatctgatacaagctacagaggaggagaaactcagaggggagaccccagagtgtcagcctggggttggcctcccctgccctcagccccaggatcctgcacctctcccttactctccagataagaaacaggtatgttcctgcctctggggctctctcctggggacccttctctactggtcacagtcagaggcagtgtcattcattgggagctatatttcatgtgatatctctgacctagagatgtgttcctactttcctgcatctggaacatctgatgctctgagagcaactgtgggtccttgggtctctgaggaggttagctttgccccaggtcctctcttccaggtttttcttttcttttcttttctttctttcttttttttttttttttttttttttttgagatggagtctcgctctgtcacccaggctggggtgcagtggcacaatctcggctcactgcaacttccacctcccaggttcaagcgattctcctgccttggcctccctagtagctgggattacaggcacctgcctctacacctggctaatttttgtatttttagtagagatggagtttcaccatgttggccaggctggtctagaactgctgacctcaggtgatccacccacctcggcctcccaaagtgctaggattacaggcatgagccactgcgcccagccttcttccaagttttgacagggcttatttgtggccacagggggattatggtgtctgtgggccccctctgggatccaaaggtgggtgtggactggattaaagtcagtccagaaaacccatggattggactggagaatgaagctgggcacagaatgcaaaggttccctcttcaccgtcactgactgaaaggtgagagcacagccggctgattctcatgggactgctgccgggaagcaagctgtggctgcagcccgactgagcaacctcttcctcaggcctctgctgccctcacagctggggcaatggcagcagcggaaaaggatgttctacattccgctgacaccatctgatttgttgggagccgaaaaggccaaagagatcgtgaccaactcagcattccactggaggctatatgatcaaacagcaaactgtttatcatgaatacaggatgtgagcaaactcacgactgcacctgccgccagaaggtttgctgagggcggtcactccctggcgccggctccttgaagttatcttctgggacatctagggcctactgttcaaggaatacagtcttgcaagcctactctagatggagcagctgacctcttcttccacccctccttctcgctatctcttttgcctaataaatatggagggctgtgtaaagttcagggcccttgtccactagaggcaaggtgccccctgaccccttcttccaaacacattcttttgttctcttgtctttgttcccgcgttcgtccccctttgttcagtcccccaaggtccgtgcagtttacaagcggtgccccgaacagtgacaggattgggcagtctacaagtagcaccccaaacagtgagagaactaggctgtcttcactgattagcctctcccacttggaagtgggcacaaccttggagtgatagattctcttcctggattgaatgtattgttcctctcccaaatttctgccttcagcaaacgctacttttgccctcagaccactacaggggaaatgaaagctgagctctcctctcccctgaccacagcagggtgggaccttccttcctcctcttcctcaccacctgaagaccaacccccacttccctcaagagagatgtggagtttctgggtctgttttccccagttgcttttcttggagccccttgcatagggtcataggagagtgagactgagactctcctaaaatggaaccctctctgtcctcagctccagccgtggctccagctctggctccagacttaggtgagctctttgggttcagggtgaggcagaaagaacttgtcctgtgtctctcctcctactctcacttcctgtgggccctgcctgcacatatacatacacagtctcttcactttgacttttccacagttttccagcctctacaactcctcccctctgtggagtgaccagcaaatattcctctcctggcctctctctctcttgaaatgaatagcctgctaggtctcccatggacagctccccatctctgagctcacgggactcttttttcaatctaagtaagatcccttgtgtgcctaaacactttgaatgtcttccatcacttccaaagaccatgcttccatcagctgcctgatattctgttcctccatttagcctacagatcctgaagcatatatacataatatatatattatatatatgatatatgacatatatatatatatgtaatcttttaggattgggcacaaagctaaagactgaaaaggaccatgagtcttgttctttgtcctccagagctccaattgggtacgagtaccagtcggaggtggtacagaggtgagaggagtagggaagaagagggagaggggaagagacacagattgagacagagagagagagagggagagagaaaaagagagaagaggaagagagggagaggggaaagagatagagaaagagagagacagacagacagagagagagagagagagaaagttttccttcaacaggaacattccctttgccctcagacaaggcaaagggggaaagaaagagactagaaacagactgagacagaaagaaaggtagagaggcaggaaaaagggagacagggagagaaagacagaagaggggaaaggggaagaaggtgaaaagagacatagactgagatagacgaagaagcagggaagagagagagaaaggggtaggagagagggagagagacagagaaagatgagcaggaggaagaggagggggggaggagaaggaggaggaggagggggaggggaggaagaggagggggaggagaaggaggaggagggagagggggaggcgaagggagtttatcacaattagacagggattcctgaaggccccgggggtggagtctgtcctaagaggcaagaaaccagggatatgtgcagattccctctctgagtgatctaagggcccatctcctgggcgtgaccgagagcccgagaagggcagacacagactgggaggttttcctatcctgcgccgttctctcccatgtctaccatcagggaccgcgcaaagaggctggtggctctcgctgcacatccagacacgttttggtcctggcgagccacaggcatcagggagagtggcgctgtccctggtgctgaagcaggactgtgtccctggtttaggaatgactgggctatgcagaggagtctgactagataggatccagatcggggtctccagccggcaaaacagctgagtcacaggattgggccgcccaagagggaggaagttaaggaggggccgactgtgggtctgtatgggctggacttccctctgtgcccctcccggctccttctttaccccaggaatgttttgggtcaaagccagcagcagctcatctgtagacctcttgttgcatgaaaaaaaaatcttatttgttaaagcccctgaaaatcaacagactcacagtaaagtgcatttctcgttgatacaatacggaggggtgaagattaccccaattccatttgaagccaacaggatattttccaaaagtgccatactcctttaaatctcctgaccatgcatgacagtgcccaatatgacagactttttttcacttttggtaattcaagattagataaataatataatctcccttccttacttttcaaagatgtgattataaacagccttgttgacccaatttttaaattaatctctgtgaattatttatttaaagagtttatgcagaggggctttggggttttccttaacaatgtgtctaagctttttgtgaagatattagtcttctcctattatttaccttggagaataatacaatttttttaaccgacaaaatatgcatccctaaatatcaaagtttaggttttactgtttttggcatttatgtaaattgcatcatattgtatgcatttttcctagctacttcacacaataatagcttaagaattttttactgtcatgcagaagggatgcaaatcattaagtgtacagcttaatgatttatcacacagcgagcacattcagctcacaaaataggtattgccagctctgaaaatgcctcaacaaactgcactcccaccatcagaacacaaaggtcccgatttactcatatctttgccacactcgctgttatttgccttcttgattttctgaaagagtgtaaagaagtatctcatttctgtttaatttgattttttttcagctaccagtgaggctgcgcatctcaacgtggacttgttttccactcatgcttccatactagcagattaatattcatgtgctttgcatacttttactttggcttgttttcctttttctcattggtttgtgggagtttcttacacattctagttcaaaagtccttgtgagctttaggtgaaacaaatgatttctctcattctgtcatttctcaatgaaagtagtctgatttgtccttgatttgatggaaaaccagagtttggatgcaaccaaatgtgtcctacaaattggtcttttttttttttttcctggttggttaaactcagaattttcgagctttaacacccctatcccaattaccccaaatcacctcagcttccctcaggctttacataggaactggtggcgacatcagtgaaggcctctctgggcaacttccggttcacattggcgtccaggcgtgatttcttcagcatgtccattgacgcgcatgttcaatatcacttttggagctatgctctgcagatagttatcatggtgtaacgcggtggagggcgtgtccgttatttccattgtaaacttttcttcagcggctttgtcaggagaacaacatggtcgtgcccagatagagttggtcactggaggacgccatcttcaaaagatggtcgttccatacagccagggaaggccttggggtctcacacagcaaggtcttggagctgtgccatactggcagggaccctgttgtgtatatatctacgcagatatgtgtatgactgacattacatattctgaaaaataactcttttatatttttacacttatttgaagggtttttttcccccttctactaaagaattcaatgtcttcttgaaaattaacaaactgcatgtgcttaggtttacttctgggctctctagtctgttccattggtctaactggtccatatgtcatttggaatatagctagcaccatacggctttgattactgtagctttgtaatgtaatttgaaatcaggaatgtgattcctccaactttgtttttcttgcttaaaattgtttggctattcagagtcttttgcaattccataagaatttggcaattatttttttctgtgaacaatgccattggaattttgatagagattacactaaatccgtatatcactttgggtagtatggatattttaacaatattaattcttctaatccacaaacatggatatttttcatttatttgtgtcttcttcaatttcttccattaatattttgtagtttttcactgtacagatctttcacttctttggttaaaatttattcctaagtattttattctttttggtgctattacaagtgggattactttcttgatttcctttttggatggattattcttggtgtaaagaaatgcaactggtttttgtatgttgattttgcatcctattactttgtggaattcatttattcattctaatagttttgtggggttgttaggattttaagacacaatgtcaaaagggtaatctcttcaataaatagtgttggaaaaagtggatatccacaagcaaaaaaatgaaactggactctctcatcttacatcctacgcaaatatcaactgaaaatggagtaaagatctaaacatgagaccagaaatagtaagactcctacaagaaaacatgggggcaaatctacctgatattgacattgatgataattttttggatattacaccaaaagttcaggtagcaagagcaaaactaaacaagtgagattgcctgaaactaaacagcttctgcacatcaaaggagacaatcaacaaaatgaacatgcagctgataggttgggagaaaatatttgcaaaccaaatatctgataaaaagttgatatccaaaatatatgaagaatgtatacaacctaatagcaaacaaacaaacaaacaaacaaaaacccaacttcaaattgggcaagggacttgaattgacacttttctgtagagacatgaaaatgaccaacaggtatatgaaaagctgctcaatatgaatggacaaaactacaatgagatactgcctcacacttattagaatggctgttcacaaaaagataaaagacaacaagtgtgttgtgtagggtggggagaaaatggaatgcttgtgccctgttggtggaaatgtacattgatacaattgttatggacaagagtttggagactcctcaaagagttaaagggaactcaatatgacccaaaaatctctctgttgggtatataccttaaggaaatgaaatcagcatctcgtagagatacctgcacccccatgttcattgcagcatgattcacaatagctaagatatggaacaacctaaactcctatcaacagatgaacggataaacaaatcactgtgtgtgtacgtgtgcacacacacacacacaatgaaatgctactagccttaaaaataaggagatgctgccattagccacagcatggataaaactgaaggacattttgctaagtgaaataaaccagacacagaaagaaaaattctgcacgatctcacttacatgtagaataacaaggaaaggtgaatacatagaaacagagtagaatggggcagggagtgggaggagatggggagaatgttagagggtacaaacttatagttatgaaggataaagaagtctagagataaaatgtacagtatggagaataaagttaataatattgtatactcaaattttgctaagtgagtagcttttaggtgctcttaccacagaaataagtaagtatggacggtgatggatatgttaatttgcttgactgtattaatcatttcactgtgtacatgtctatctgaatatcacgttgtacatattaaatatatacaatgaaaataaattttaaaaattaaaataaagaaaaataaatgaaaaccaaatactgcatgttctcacttataagtaagatctaaatgatgagaactcatgcacacaaagaggggaacagatatgaggatctagttgaggatggaaggtgagaggagggaaaggagcagaaaaaataactattgggtactaggcttagtacctgagtgatgaaatgatctgtacaaccacctcgtgacataagtttacctatgtaacaaacctgaacatgtacctccgaacctaaaataaacgttaaaaaagagaggaggtgggggagaaaagaaacttaaaaaataaaatttaaaccaaagttccagcatcattgattaagtaatttatcctttcccacagacctgttgtgctggctaggttcaccttttccccagtgatcttctacttgccctcacacatgttagaattctatactatatcagcctcttggcttccattggctgttcacacccactggtattttattatttatattgctttataataacctttgatatatagtaggacaagcctcaccattttactcttctccttcaaagtgtcttattcttagtctgcactttcacatgttccattcctctctaccctaaatgggattttgaatgaaagggtattgaaattattgattcgtaaatgattggcatctttatgtaactgggacgttctattcattaatacagcatatggatcaatttatttaggtgtttgatatcttccaacacagttttataaagtgctacatttagatgtaacacatctcttatagttccttatttttgttaatacttcaagtggtatctttttattacattttctatcaacagttactggtatataatgatacaattattaaatatatctgtattcattcgtttgctaaagtttctgttataatttgtttttacattattttggaattttccatatagaattgtatattatctttaaaaaataaaatagaattggcaaaactgaaaagtgactgtcaagaagaaaatctctcttccaaattatattttaaaataattcatcctctcccatagtgttctaaaaaaattttatctttggtatccttgcacagtttctctgtatacctggatgaacccattgatgaaattatccattaagagacaaactgtgagataatttaggaatcctgcaatattttatttaaagggaggtgaataaagaaaatgcagtcaagttaatggagaaaacacaattactcaggactacacccagccagcctaaagggacagaattttcaggatgagatttttcagtcatcaaataggcagaagtatatctaagattgtgggcaatggtggccataaagtaaacaactgggctggttatggggaaatagaaaggtgggaacacaaaagtgtggatctgagacgaactccttcttcatgataaaataaaagcttttaatgctcataggaagtacaaaagttagattggaattggaaggagcaggaatatcccacaaaataacactgaaataagtttgacctacaaattcctgattgcacaagtaaacatgtttaagactaagagagaatgatgatgcttaggaaatggaccaggaatgaaaaagtctggggtaaaatcccaaggctggtaagagggttacattcattgagtagaatccccacccacctatttattaacccatccatccatccatccatccatccatccatccatccatctgtgtgtccgtgtttccatttatccatccattcatgtgtccatatgtatcagttaaagtccaattactaaaaaagaaatcacataaatatttaaaacagaggacatttaatggcagaaattgattacgcagttgatgttagggatgaaaaattaaacagaggacaatcaggcaacctagaaatgaacaacagcaggaaaccaccaccacttctaggctagaggacagagggaaagggcagtgcaccagagcccagtaatcaggggcacccagaggctgagtgctgagcactccgagtctgagtgctggaggctcagagagggtgctgccactaccaaagagattgcacaattcagagagaagggaaaaaataaatgctgctgcttctccattttcttcctgtattttaatctccagcattagcctctcattatctgaacctagttggaagctggctaataaagatgcctgataaatgtggtctggcagaggaagtatctggagtacatagcaatgtagaggaggtgcaaggaaaggttctgagagcagagcagtcatggacggtccatccaaccatcaactatccagccagccactcatccatccatccaatcattcattcatccatccatccatccatccatccatccatccatccatccatccatctcgcccagcagtacagttcaggagataggatatgaaactggacagagattatttctggatgaaccaagtcagcaagtgattcaagatgcagagaggtgggctttagtaagagatacaggggctctgttcctctggacttcaatgtccatcttctcaccatgtccagaggagagagatcagttcagtccactctcccagccatgcttctctgggaccctctgatcctgtgagaaaatgtaagaggaggttagcagttagggctgcagagagctcaccctgaggaagacagaccaggccacttttccttggaatttgggggctcagagactgggtcatctgagcaaggcactgctcacctagtgcagcagatccaggtgaatccacagatgaatgtgcagctggtccccatgaggattcccctaatcagtgtgaaacccagggtctgtaaaacgccttcttctatagagataacggagtcacctgaaggggaggagaggaataaagtgtttctcctagacctcatcccactcacagtcccatcctagaatccaggtgccctgtccattcttcccaccaatgactcactctgcacagagaggctaatggagacatgctgggagcccaaagggtgctgagcttggcagacaaattcccctccatcacaagactccactgggggcagctccaggacggctgattctgacgactgggagagattcagggcttggccttcccaggtccagctcagcctggcaggtgggttgctgtcagtcacataaacaaaacgcagggattggttcttcaggactgacagggaggtggcattctccaaggctacaggtgctgggaatagaggggagaagagaaactcagcaagagagataccaagagaggcacatgcaggccttgggttcagatgtacagaggggtcccccttccccttcatgatgcagtttggtctcttccccttctccgttattctgttagtttagatgcagactccgtgaggtacaggaatagaggaaaggactttgtccttgatgagaatcccagtcaagatctcctggccaccccctagttcccacaccctctttcctgctatctttaccaacatctccagttaccctaaagtctaatcatttatttattcaatctgcagccctttactgatccttgtttaaatgaggtactactgagagggtatcagctcctgagggtgtcacagtctaatggttataagaggcccaggactagatcttcactctgcaatatgacaggtgatgtgatggagtgactcaggtgaaggagggtgagcaacacaataagacagaaagtcagggaggtctccctggaggaggaggggcttaagaagagtgagatggacaagtggaaacagacagtggacaatattggagcagaagaccatgctgggagaaaggaagagcagtgcaaagacaactatgactagaaatggccttggagtttcagggaatggaaattaatcctgtaagggaagaggatagaaatgtgcataatcatgtggagaacagggtgaaaagaggaacctttggcaagattatatataaatataaatgtaaattaaatataaacataaatataaatatgtgtttgtgtatatatacacatacattatgtatactatgtacattatatataatctcagaggcgggagagccagaatgataaacaaagatttacaagcaaagacttacaaactcaactacataaaacaaaacttccatggcacatccaagctaaatgaaatcaggagagaatgatgaaattgacaaacttttctgaccaatgacaaaaatactggaaaagacatttgcaattatattatggattagtggttgcatttcctaatataaaaataacatccaaatcatgaagaaaataagcacaagctaatgacaataggaaattgtatgaacagacagttcatagcatggcagaacacaacagaacggacaatgttaatgtcaattaaacctcaccttcatgcccagctagagaaatgcaattaaagctatggtgcggtacattttttatcagtagtcatggaaaaatcaaaatcattgctaacgtatttggttgttgaggttggagtgaggcaaaaactaacacattgcatgggctggggaggacgtggggattgcaaaatggtacaaccacgggaaaagccatgtggccacacctctcagaattggtaatgcatgtgccctttgatcaaataattcaaatttatacagacatattagcttccttgcaaaatatatgtaagtattatttattgtagcagtgtttataagtagcaaatgacatatatgcaatggaatattttgtagttgtgaaaaagaatgaagttctttatttactggcataaaaagatctccaaaaattattaaatttaaaaaaaataggccaggcacggtggctcatgcctgtaatcctagcactttgggaggccgagtcgggtgtaacacctgaggtcaggagttcaagaccagcctggccaatatgatgaaaccccatctctactaaaaatacagaaattatccaggtgtagttgcgggtgcctgtaatcccagctgctcgggaggctgaggcaggagaatcacttgaacccaggaggtggaggttgcagtgagctgagatagtgccattggactccagcctgggtgtcacagtgagactccatctcaaaaaaaaaaaaatagggtgcagaacagtgtatcaaggatgttttgtgtgtaaaaaagcatgctcacatgaaatttttatatttacttgtagatgaagatacacatgcataaggcatctctggatgaatgtatccaaaacagtttacaatggaggcctcagaggaagcaaactaggaatctggagggcagaggtgagacaggtgcattctatacatgcccacttatatcttttctttatgagatcatgtgaataaatcgcctgggaaaaaatcttaaattaaaattgttgaaaagtagagaggagaggctgaatgaagaggcaggaaggcaacatgtgattctcagatttggttctgttagtgttggggaaagagctgagaagttccagaaagctgccaggccaggcacagtgactcacacttctaatcccatcactttgggaggctgaggccagcagatcgctttgagctcaggagtttgagaccagcctgggcaacatggtgattccctgtctctacaaaaaaatacaaaaattagccaagcattggtggctcgcaccagtagtcccagctactcaggaggctgaggtaggagaattgcttaagcttgagaagcagaggctgcagtgagccgagatggtgccactgcactccagcctgggagacagagtgagaccctgtctcaaaaaaaaaaaaaaaaaaagtcatcggacaaaacaaaacaaaacaaatcccccagagaggtctaggtaagtgaggtccaggaaagtgtctataagatttgacaataagaggccaggcgtggtggctcacacctgtaatcccagcactttgggaggttgaggtgggaagatcatggggtcaagagattgagaccatcctggccaacatggtgaaaccccgtctctacaaaaaatacaaaaattagttgggcatggtggtgcgcacctgtagtcccagctacttgggaggcttaggcagaaggattgcttgaaccctggaggcgaaggttgcagtgagctgagatcgcaccactgcactccagcctggtgacagagcgagactccatctcaaaaaaaaaaaaaaaaaaaaaaagatttgacaataagaaagtctttgtcatggtggtgagattagggagtgttccctggggctgaaataggggacagaggatttagatttaggaagtcttctggcacctgtgctggaattcctgatctcaaccctcctatcgtgcaagctctgagacttagactctattctgaggtgttcttagattctctctaaggtgccctcccaccctaatcacaaccttggaaaggagggcttgcctcctacctgttttatttccatggaagacactgatggtcaggttctgtggagcatctgaattcaaaagatgacacatccctcttcagttttgagggttaggggagcatcctttggtcccttcccctgcccagaatccaggaccccactccaagtatcccataccctgactctcttcccacagtcactgcccaaaataactcagactcacaggagacattgagttggatggtcatctctgtggtcacatgaaaccttgggaaagtcacttggaaggtgatactggagccgtggctccagggaagtgggatgatggtgatctctgagaagtgaggggtcctagggcccagggagatgacagttccccatgtccaggaaaagatgagtgactttctgcttttccaggctgctgacacgtagcaggttcgcaggatggccagattccagagttgctgggacttggatgtcaggtgtctgggtgagggctgggaaggagagaggcaaagacctgggacacagagaggggacttccagggtgtgaactcagaagcagcctctgtcccagccccaggaatggctcccccatctgagccctaggctcctggacacagcacgcctacctatcacgttcaaagacagtgtcttttgcttgaagctgaatttcacgacaggacccctctccaaccgaaataaatacactccgccatctttcctcctggtgtctctgatgctcagggaacagatgtcagtctgggggtccccaaggaaattggaaatggtcctagcttctcttttgcagcttctagctgggtttgtttgtggccatgggaggatcccagtgttcattgtccccttgccggaaccagaagacgtagggtgggtctgagtgactccatctgtcactggggtaggagaaggagcagggcaccaggacatacaggccctcctgcaccatcaccagctctggaatctgcagctcataccccgcgtggtcctccagcatttaggctttgacattgagctcccgccaaccctcccgcctctgcccagccccctcacctccccacagcagggacagcagtagcagcagagatggcatctctgagactgcaagggctgtttagagcccccttcaggccatctgaggagcccttcccagcagacacctggtatctattttgagtttttgcctcaaacccttccctccaacagaaacacccaaaccacttttggggaagtgaaggcttagcccaattcaccgcagggccaaggacaccctagcagggaactttgttcctttcgcttccccactcagacttcagattatgccccctgaagccaattcttcaccttccctcaggagagctgtggatttggggtcattttcccaccatgcagggaaggagatgctggaagctgggtcccacctgggactgaatcctcctattccatgctcctcttcagatctgggcacgtcgggagccttgggaagccctggctgagctctcgaagttctctgagcagggaaacccgtggtgctagggttgaagcctgggggccatgaatggagcccctgacttaggtgggatatttgttgctttctgatgcttgtttgggttcaggaaggagcctggacttgcctcacagacctttcttgggtttctgtgtgagctctgactttgctgtggggctttttttcttccagaaagaacccaggaagcattgccatttactgctctcactgccctgaacgcctgccctgaacccctgctctgcctaccccttggatttctttctcttcgcaggctcttgcagcaggtcctgatgcccctccttcatgctttacccagtccttcatctgtccccacatccactaagaccgcagcatctcccttcctcatcctgcctcctcccagcagacatctggcctatgggctgccttcctgaaaactatctggcttgtggttacatgaagccagagtccacttgtggttatgagcacacgattgtcctgggccacataatgtgtgtttagcttgatcctaaatgagtttcaacctaacaccctcatctggcctctcctatctgagtctggatgtcagctacccatccgtttgacaggtattgagcacctttgacctgccccagaagtggcatcacattgacctaagaaatggcatcaaggacaaagaaaaatgaccacatcaagaccctcctacacaagaagacacgggatgacagagaaccaattctgctactgatagtggagctatggtttccaggacgagagtagatgaaggggtttgccagctgctataacaggatccagtaaatgggctggccctaaggggtgaaagtgcagattcctccctcaacccctgaggagtctgactggcacttctgatatttggggctcaggaagttaaaaaccatagaaaatattaattccccattcataatataattggcatgtactattcccatatgtgcaaattaactcttcgctgtgaacatatgcaacttggcattccacactcaaccggcataggggcagactaggagtcccatggagctgatgttcccaggagcacccctcagcctatgctggtggataatacctggtgtgggggtgagtgagaaagatcccagtagaatagcctttctcctccccactccttcctccacccatgaagactattctttattcaagagagacatgaaattggggcagaagtgtgctgagaaatatttaacaactggatttccaaaaaatacatattcataataaattttactgatataaagtatttgtagcacactgttgagcactcaatttgtcgctgttcggggtgccactatgtaactctcatggacctagggtaactgaacaaagggaggtgaacgtaggaataaaagacaagagacaaaagagcatgtttggaagaaggggtcagggggcaccttgcctctagtggacaagggccctgaactttacacagccctctgtatttattaggcaaaagagatagcgagaagtggggtggaagaagaggtcagctgcttggtccagagtaggcttgcaagactgcattctctagatgtcccagtagataacttcaaggagctcggcgccaggaagcaatggccctcagcaaaccttctggcagtgggagtaattgtgagtttgcccacatcctgcattcatgataaacagtttgctgtttgatcatatagcctccagtggaatgctgagttggtcacgtcccacgggccttcatctccctgcagcacgtaacttttaaataataataaaatgtactatactttttattgtaaattctacataatcaactgattctcacagaatgttttcactgatttttctgaacttttgcaacttgagctaacttataatggcaattgatgaacagtacactgtgtagttatgaatgttggttgatattttcatttacattaaggagtaagataaaacagaaataatgagatgtatggtgggattttattcttctgtcaatgacaggagtaaactctttgtttaatcagataagttttggaatatctacactagaagaatatttctgaatttttgtgctatttacagtgtaatgactgcagatattaacatcttttaagttgcattattaatattttattcatcactatatcaagcgtagacaatcaataaaatgataaatcaagacttgatggatagtatttgccaatttctgcagtgtaaacacttctatcatgactgacttcaagctacaaatgtgactcgtgtaaaaatataatttctgattatttccgtagaagatatttttagcagaaactggatcaccttttcaagagaaagtaatatgtttgcaagacaaagatgagtatttacaaactgctttcaaaaatggctgtaacaggccatgcacagtggctcacacctgtaatcctagcactttgggaggccaagatggaaggattgcttgaggccaggagtttgagaaaacggctgaaacagtgtccatttccccaatcttgaatgagagtaaccattgcctctctcgtttcaggaattattaatttttccagttttgttaattggcagtttggatagtcattctagacacaagaataaaggagatcacactcctgattaaaacctgtcagtgaccttcattcctccagccaaagccctcagccattttcccacataaaccctaagcagactaagaatctcattttcataggcttggccaaagtttgtcttcaggccacatgcaatttccaagggctcctcttcctttacttctgtggaaggtgcaatatcagaatatgaatgaatcagaatgatgttcttagaatcttaatattggatccatttgaacagatcagtaattgaactttgggaaaacttcagcacacttccttagcatacaatttcttgtgatgcgaatcacaactgttaatttgtattttgcttttgaatcctatatctcagagtgatgaagtctctttttaccagaggtcttagaataggtttgcttaaaatgagatatatgaaagaaaagggtcattttagtcagtgggcgagcatttatccttagctataaatgaaggtgataaacagtttcatttctgtatatagaatggtctgttcaatactatattttttgggtaaagtttcttttaatgctcttggttgtttactttctttgatttccaggaaaaaaaaaacaggcacaattgctatcagatattttgagggcaggcatcttgttgagatcattatttaataaggcgttgagtcatgaaggcagtagactggtttgaagttggccaggatgagagttcttggcatagtttaaagcaaagcatttgaaattctgaagtcctcataagttgcaaacagttgtctttattttttgaagcactttaattttgaagcacttttatttaagtttcaagaaccagaattgtttttctttttcttttttgactttcatctgcacaagactttttgtctttattttttgaaggcttttaattttgaagctctttatttaagtttcaagagccagaattctctttctttttatttttcttttttgactttcatctacacaagatatatgaagattcatagtcagaaagttttgtctgtcttcttgaggaatagccaactccaatcttaaaaaactcttctagaatgtcataatcaaatttttaaacttctaaagattagaatagatgaaataaaaaagcaaccacagactggaagaaaaatgtttgtgatatgtatatctctaaaagacttatttttagaatatataaaaaattttcacaacacaataattttaaaacacaatgaaaaatgggtggaagatttgaagagttgcttcagcaaagaggataaatgagtggccattcggcacttgaaaaaatgcttgatctgggaaatgcaaattaaaattactatgagataccactatgagatactcactaaaacatattaaattaaaaagactaacaatactaagtattgataaggcagtggagcaactagaattaccatgcatatgataaaagataactattaaaacaccaactctcaccctaaataaggaaaattcaggagcattctcatttgaatcagaaacaagacaaggatgcccactgtcaccactgttacttgacattattaaagaggttatagccaacaaggtaaaaccagaaaaataagcaagaaatgtaaaaattagaaactgagaaatatttccagtatttgcagatgatgttcaagttcccatagattttaatatcataatctaataatagagataagtcccataacttttgccatattctgttggtaagaagcaaatctcaggttccgtttgcactcaaagggatggatttgtacaaggtgtgactcagtaggtgtcaccttagggtatgcctgccccactaagagtatgagggcgcagttacccctcatcctacagatatacagatgtcccagtggagggacgccttaacttgccctgaacatacacatgcggggctgttgtacttaaagcctcctacttctatctcaattttcactctctgcattttcctttttttaaataaaatgtaccaaagccgtagggtaaatcctatgacacagtaaagaatagtctcagatttataagtggagaaaattcaaaagttctaagtccggggaatttcttagtaactcaaacaaaatgtcacactttctcacataataaagataagtgtttttattgattttacactatttgcttacagtaaatatataattgatgttttaaaataaaagcaggtttcatgcttcatgtaacaaagttaggttcagatactaatgtgaaaactcaactattcctgggaaaccatgttcaaaaaaatgcttcattggctaagcagtcttattttattattcaaatggactaaaaatgaggtatgaagtaattaaaagtaatatggtggctttaagtgcagagatggggtggcagaagctgtgaacacagaatgtaaaatcggtaactacaaaatggcacaaactacgaaagcaatatatttaaattactattttttaaaaaagaaggatcatttcagatcttcaccttcagatcctcactcagccctgcctcctatttcccataatcagccatttttttaattttatgattgctattactcaccttctagaatatatttttgtttatttgattgaacaacctcttcctgaaaattctgcccagttgggctggctgacattgatctcagtaattgtgtttttttcctttaacttgattatatttttttcattcgcctctctttaaatgaagtgtcccaagagccctaaattctctcttcaggtggtcgcttggtaggttacttcatcaataggttcatccaggtatagagagcaatggtgtaaggataacaaagatacaatttctcagaaagataacattttcaaaagtgctattaaagacagtgagttgttcagcaattcaggaaaaaaaagtctttaaatcagagggaaaaatatagagaaaaagtatttttcagaatacatgtcagtttctcctagaaatatatatacacaagtattgaataggtcccctgccaatgtaggacccaagacttttactctgtgacattccatttgtccttggctgtacggaataaaagccctttgacgatggcggcctccaatatcataatccgtatgggtgcggccatgccgtcctccctaccaagtttctgaagttgaatgaaccgcggaataaaggtacgccgttatacgccatgataactgttggcggagcgtagcttcaaaagtgttagtgggcatgcgcgcggttcaacagcgcctacggaaatcctaacgggaatgtaacccaaaccggaagtggcctagagcgaccatttagcttctgttgttaagtggatctaagcctatgtcgcttactggacgctgaagtgattgggaatattagcagtgggggttctgtagggtcaggaaggggcggctggctttgggggagtgatgaggggcttgttgggggtgggggtgcgtgataaagggatttctcggctgaagacgaggctgtgaggtgagtgacgggcttgttttggctgagcgatgaggggtttctggggtgggtgatgggtgctgtggggtaagtggcgtttgctaattttagttggataattagcctgttaattttccctcttttcttgcttattttctgcttgtagtatttttgtgacttaaattccaagtgtactttaatatcggattttatattggtccacgaaacttgctaacttgaggacagtgaacgtgcatcttaagagcgcctttgcggatggtgctggaggacgttcagggaagggattcactgtccgtgggactaggggagtcagtgattgattggcagccaagagcttcagaggttggaggactttgaggatcacactgtaacactctcaggggaccagtgatgggcaacctataggaatcagtagagtggggttgccaggggtagcctatggcagccagttgactggaggcgtagggggtcaatgatggggatttgtgagggtgaatgcattgctttctaggcagtgagtgttggggtccttcagggattggtgggtgggtcagtgttggcctcttcttgggtcccttggacatggtaaggatcagtaattgacagttgagcacatcgatgatggtttcctattggggcatttcatttggacccctatgttggggattatttgtcgttttatggaaaccagaaaattgtgctcgctgggaaacatttcttggctatcagggcagtaaagatttcagaagcctgtgccatgtcagtgactgggaggcattttggaactttctggcagccctgtagtacactcattggggatttctgaaagtcagtcctgtcagtgattgcattcaggtgcggtgggggcaacttattgtggacaggcaagaaatggtaactggaggccctgatgcatgtctgcaaattttctgtgtcaagatggggattgggacagtgattttaagttttagctctagtcagaagaggctggtctgtgtgtggtgtattatggacggggactgaaaagtccagaagctcagaataggtacaccagacagagccacctcccggcctgagttctatgaaggcaacagaaagaggaaatggtgtttctggaagctggccacgtatgggtacatgagatagtggagacagtgtacagtttagaacaaggcagatgtggggctgattccctgtttttccatttacagactgagtaaccttcaggcaaattatgtaacagcacacagcctcattatcctcatcctcaaaatgggtatgataatgcccatgatatttagctgacaattaaattgacaactttctttttttaattcatatttatcacgtgccaggcaggcactgaggacttgacaagcttcatcttggttaagtttcccaacatctgtgataaatacctgcattttcattttggaaactacaactaaagtaatattttcatattctcacagtgaaaatgtggcaaagctgcaatgaattcaccatttagtccagactcagtctttatttttaaccctgactaataactagagttgggctttctgaactttgtctactccaatgtctgacacagtgacttcacctcagtgccctcaggaaatatttgtggagtgaatgttgaatgagtgaccatgtactcattgcttttccaaggcttctgcagaacccccaggtcaggccacatcattgaggctgcaggatctctcttcatagcccagtacgactctccgccgtgtccctggttggaaaatccaaacacctatccagcttctggctcctgggaaaagtggagttgtcagcaagagagaccgagagtagaagcccagagtggagatgcctgctgatgtgaatttatcccagaagcctcaggtcctgggtccagagaagcaggatggatcttgcgaggtaaacaggggcagccctggggatagttctccagaacgtgagggcagacacaggatgcagcaggtctgggctccctgctcctgagtcagtcttgagcctcctgtcaagcgaggaccacagaggctgatgtttccacattcataggctatctgtgttctagaggaaaccatgaactggctgataaaagaggatagtagagggttggccttgggtcaagaaagaagaaactgtagtccctggtctgatcagaagccccagtcataggatggaaaagctgactctttcctgctaagcactggttctgctccttcatccaccactgggtctttgaaaaatttcaagtggtcccccccaccaaattccttgcttggtccatggggtttggcccgtttttcctctgttctcataaggtgcggcaaaatctccttcctttgtaatttaaatagtcacagggaggtagagtgagaagaggcttttaaggaccatgtgaagaggcttttaaacactttttcctgtttaaaaaggtgaacaaaaaatgctggaaaacagtgtttccagattgcccacagatagaaatagtcaggatttggtaacaagaaatcagaattcttggtatagtcaagatttcctgaaatcctaaattattctgtgtatctcttgatgctttatttacaagtctttaaatagtatgtgactataatagtaaacagtgtaccattgttctgtgatgggtttataaccaaatttacagagatgttctgttttttaaaaaaagtataataaatatgtgtgttattatcctgaaccaatatattgtgagattatatatttcagtaacctgttaaaatcatctcaacctgctagaaacatttgataatagaaagtattaaaagaagggaacattaacacaaaataaattgcacatataaatcattttcaaaattgtaaataccccaaatatttaaaagtcgttcttaaaagaaaaattgaaacatacaagtttaggtggggcacagtggctcatgcactttgggaggccgaggcgggcggatcacttgagcccaggagttggagaccagcctgggcaacatggcgagactctacaaaaatacaaaaattagccaggtgtggtggcatgcacctgtagtcccagctactgagtacgttgacgtgggaggatcacctgagcttgaggcggtcaaggttgcagtgagctgcaatcatgacactacactccagcctgggcaatagagtgagaccctgtctcaaaacaaaacaagtttaaaacatgaaattgtctaagtctttgtgacagcagtgcagatgcacaaacgtttctctcatttgcattgatgttggtcaacttgcgtgttcagaacatcttcaagtttagcgttttaggacacatgttcaatataagcttttttccttttttaacaatgaaattttttttctgcttgacctgatttccagtttatcatttgaatcaatactgctgtcgctaattcagattttccatcagtgtctgaattcatgtcagagtatatcccagtaccatgcacattatcttctctttgtggtgtgtatttccctctgctctggacagtactatttttattttgttatttttatcttttctaatgtgatggaaataaagatagtatagtgttttaatttgcattactttgtttacaaacaggcttttttttcataattttattggtcaattacttgtctttagtgagttactttttcttaccttttgatttatattttggtttggtttagcctccggatttttagagaggtttttttttttttttttttttttttgagacggagtctcgctctgaagcgcaggctggagtgcagtggcgcaatctctgctcactgcaagctgcacctcccgggttaacgccgttctcctgccttagcctcctgaatagctgggagtacaggcgcctgacagcactgctggctaatttttttgtatttttagtagagatgaggtttcaccatgttagccaagatggtcttgatctcctgacctcgtgatccgcctgcctcagtgtcccaagagagttcttacacagtaataacctaaggtcctttttgcatatgtttgtaaatactttttgttactttttcctttgaaagtaggttttagttttgtttgaacataggaaagaggatcagatggttttgtgaagcctgtaatcttttaaaagggctgtcacttgctatatttttaccaaagttccagctcctcccaggcaatcacattttacatttttagctaattattttggcatttacctcctaatcttttagtgacatgcttatattgctgcctcttggattgttaattaacacgttaattaattaagaaacatgtcattaaaaggtttgcttttacccgcttcctcatactttcacccccaacacctgctttccttgcccatccttctctagaactggttcagattctgatcaggtcaatcttccttgtttgtgattatgactgtgtaaactatattcagagctgcctgtatagacaccctgataactctctgcctgcataacttacggtttttccctggagcacacaattttatggattatttacttgcctatatacatgttaatgtattataccattttctccaagtgtgtacacactgtcttcataaattgaatttgttactaggtaattgcaaaccctcgctatttcagggacagtttttttttttgtttttttttttttttgagacagagtttcgctcttgtctcccaggctggagtgcaatggcgcgatcttggctcactgcaacctctcctcctgggttcaagccattctcctgcctcactctcctgagtagctgggattacaggcacttgccaccacgcctggctaatttttatatttttagtagaaacagggtttcaccatgttgggcaggctggtctcaaactcctgacttcaggtgatccgccagcctcggcctcccaaagtgctgggattacaggcatgagccaccacacccggccttcaggaacagttttaatcctcataactttgcgaggtactgctgccattatcccccctttacagacaagaagactgaggcacagaatgaaataagtggctcaagtttacatagtcagcaagcagccagcctgggattgaaggcaggcagtttgcttgagggttggggctgtcaatgccatctccttgaggaaacctttcctattgcttttttgtcttgatgcgattggacctggctgttctcctggcgcctcacgctgtcttctcatggtgctgtgttcaccatcacctgggaattctttttttctctgtcaagtgtccagttccttgtgtcttgaatcctttcttgaatcctttggctttctcttccacggtttaccgttactctcatttcgtgaaagtgcatcccctaggagttcttggggacggtacacggcagtaaatcctgtgagaacttatctgaacatgtctgttcagataacggagactaaacttaagaataggagaatcacttgacccaggaggttgaggctgcagtgagctgtgatggcaccactgcactccatcctgggtgacagagtgacatcctgtctcaaaaaacaaaaacgaaaacaaaagacctgagaggtttacatatatgagcatgacatgaaagtgaaatgatatgaaaatgaatgatatgaaaatgtcacgccaaaaagcaaagatcatatatttgcatatttaatagaaagatgtcacggaaaatgacttgatttaccctcacactaagttgatctttgcctgggttcataggttggaaatcatttttttcttcctaaaacaccccatatactacttccttaccacacacatatagtctctctgctctcaaatcctgaaactctttatttttaagctgttagtctccatttaaaagggtttttatgctctgtcattttctatttctttggttttggaccctctttctggaagaatttctcaactttattttctagccctccgataatcattactgccttaaaaaatttttaagagcttttagatatgaatactccttttaatgacatgatgtttttgtttaatgattgaactatcttacctaaggatatttgagatattttaaaatgtaattttatgaatagataatacacagcattcacaaattaaaacatcatgaaaagtaatttttttacaaaatactcctttctctctcttttttttttttttttttgagatggagtctcactctgtcgcccaggctggagtgcagtggcacgatcttggctcactgcaagctccgcctcccgggttcacgccattctcctgcttcagcctcccgagtagctgggactaaaggcgcccgccaccacaccaagctaattttttgtatttttagtagagatggggtttcaccgtgttagccaggatggtctcaatctcctgacctcgtgatccgcccgccttggcctcccaaagtgctgggattacaggcgtgagccaccgcacctggcatacccctctctcttttgtccctgatttgtccaggtttcttccacataggtaattatagttagtcatctgcctttacctcccaaacactaccactttcttccaaagttaactactttcgtcacttttaagttaattacttcattttaaaaaacgaggccggatgcagtggctcacgcctgtaatcccagcactttgggaggccgaggcgggctgatcacgaggtcaggagtttgagaccagcctggccaacatggtgaaaccccatctctactaaaaaaatacaaaaaattagccaggcatggtggcgggtgcctgtaattccagctacttgggaggctgaggcaggagaatcgcctgaacccgggaggtggaggttgcagtgatccaagatcatgccattgcattccagcctgggcaacaagagtgaaactccatctcaaaaaaaaagaagcaagccccagaatgggaaaagattcttgttacacatacagctgacaaaaggttcctataaaacgttgaggacggctgggcgtggtggcttatgcctataaccccagcacattgggaggccaagatgggaggattgcttgagcccaggagtttgagacgatcctgagcgtcatagggagaccccatctttacaaaaaatagaaaaattagctaggtgtggtggtgtgtgcctgtgatcccagctactcaggaggctgacacgggagaatcacttgagcccggaggtcgaggctgcagtgagctgtgattgcaccactgcattccatcctgggtgacagagtgacatcctgtctcaaaaaacaaaaacaaaagacctgagaggtttacaggacaatgagatactccttcagaaacacagaaatggccacgtgcagtggctcacacctgtaatcccaaaactttgggaggccaaggtgggtggatcgtgtgagctcatgagtttgagaccagcatgggcaacatgctgaaaccccatctctacaaaaaatacaaaaattaaggctgagtgtggtgactcacacctgtaatctcagaactttgggaggcagagatgggccgatcacttgaggccagagtttaagaccagcctggccaacataatgaaaccccgtgtctactaaaaatacaaaaattagccaggcatgttggcaggcacctgtaatcccagctacttgggaggctgaggcaggagaatcgcttgaacccaggagtcagaggctgcagtgagccaagagcatgccagtgcactccagccttagtgacagagtagactccatctcaaaaaaaaaaaaaaaaaaaaaaagctggacatggtagtgcacgcctgtggtcccagctacttgggaagctgaggcaggaggatcgcttgagtctgagaggcagaggctgcagtgagccatgctcgtgccactgcaatccagcttgggcaacagagtgagattctatctcccaaaaaaaattttttttttttgaggaaaagtgttttttaacccagtagaaaactgaagaagagacttgcttgaataggctggtaaacatgggaagatgctcagcttcattagtcatctgggaattgccagtgtaactcccatgcctgtaccaaaatgcatacagttaccaacactgataataccaaatgtaggtgaggatacagagcaaccagaaggattttgtgtgctgctggtaagcatataaattggtacaaccaatttggaaaatgatttctaattttctactaaaggcgagcatgtttttcccatgacccagaattccacccctgggtatatgcccaacatctgttctgaactggtatttaaatgtagacctgtgctgtccagtatggtagccactcaccacatgtagctattgagcacttgaatgcggctggttcaccctgagatgtgcttgaagtataaaatatatgctgacttctgaaaacttagtatgaaaacagaatgtaaagcatctcatctcgatgatttttaaaatattgaatatagaatattcaatatatagaatatagaatgttttaatatatgtaatattaaaatattacatatagaaatgataatgttttgaatataatggattaagtaaaaatatcattaaattgattttatctgtcttttaaacatggctactagacaattttaagttatatgtgtggctcacattcacggttcatgttttatttccattggatggctctcctctagaggcttgatcagagtccacttggatttctttgtttttggaaatgatacttaatagtttgcacaccacgtattttcctacctctctacttttatttttttattttgcatcatattaggtgcactttaatatctggttatctctctccttgtgataaaattgatgattgggttcagatattgtcagcctactcctccattataaagacccatcagtctttcatatggttttagcagtcattggtgatcagtaacagtgacatttttgttttgtccttcaggctgcatttatcatctgcagtacttctgtaatgaagatctttccatcatcagtcctttcattaacctaatattagttattacaggagagatcatcttgttgaaatattatatgatcatatctcttccctgcacttaaaatcctgaaatggcagtccgttcattaaaataaataatccatacccattatatattgaggcaccagcccacttctttggagcttggatggtaaccaccttccaaacatgacatagtcgcctcttatcttacacagagctgtctgcttctccctgaattcacagtgttttcctacctctctagttttattcatgctcttttctggaaaatgatttccttcacacatcctgcatcacagttcttacttccagcgtaagcttcaccaactctaagtagcattaccttctactcctaggtagaatttgcctttccctaatttgcccttccccaacagtgtcctctgcatatatttctaccatgttccctttttaaccctgtagttgagcttttgtatttacatgtcttccaagtctctgagttgctgcaagagtagaagcttatgtaattctgtgttgagcaccagaacccagctcaactacagcctcacatgtagttgcttcgtcaacatcatgctggttattcctaaattagctaaaggacttagagggaacccatttctggcctcatttttgaaaaaaaaaaatgaatgaatgaatgtaggtgtacagtggatggaggatatttctcttatttttttttaaatccctaaaaatgtgaaataggtgtttggtgggaagcctctgtgatggatcgtggtgaaaatcattaaaagcatgttcctcctatatgtgccatccccactcgccaatgatgacctaattcacagtgagctggggtacactgttacaggcatcagtgtcatttgaggacgtgaccgtggacttcagcagggaggagtggcagcaactggaccctgcccagagatgcctgtaccgggatgtgatgctggagctctatagccatctcttcgcagtgggtgagcacaactgacctgggaatcttggctggatcctgttgaggagatttccttcctcctcattgcagaacgcagtgggatatcaaagtatgtcatgactcttttatcggtttgtcctggattgtttgtttcttttgggcaccttctagtattattttgtgcccagtggaaaatgttgacttttctaatgagccagtgtaaagcttcattgaatggcctctaaaactgaagaagctacacccaaatccagtatcctttctaattaacagggtatcacattcccaacccagaggtcatcttcagaatgctaaaagaaaaggagccgcgtgtggaggaggctgaagtctcacatcagaggtgtcaaggtgagtaagttgtacccgggcaaatgtagatatctttgcagggaaccattaccagtctaccatacttttctattccctccattcccccagtgatggcccgtagattgcctcctactcccagtttcccatcaaacactgtaaatgtgctataaatgttaaatgtcctataggggctgccttaagaattttccattggtgaatactcaggaatgggattgcctggtcctggagataagtatacttgactaaatcaaccatattgctcttctgatgggctgcaccagttcacactccccatgtgcagtgcacaaggatttgcatttgcacatcttgcttgctaacacttggcattaacaaaattggtgaatttatagccctactgataggtgaaagggctgtttcatttttttttgtttttggttttggtttttttgagacagagtctcactctgtcacctaggctagggtgcagtggcacgatcttggcttactgcaacctctgcctcctgggttcaagtgattctcctgcctcagcctcccgagtagctgggactacaggcacccgccaccacactcggctaattttttgtatttttagtagagacagggtttcaccctgttagccaggatggtctcgatctcctgaccttgtgatctgcccacctcggcctcccaaagtgctggaattataggcgtgagccaccgcacccagcctgtttcattgcttaagtgttatttttctaataactgaatggtgagagcctctcatcttatctgttatctgattggctttttcatttgtttgttgcattttcttaccgcttatctctttacgtccatggagttttctgccttttttttccagtttttttgcccctaattttatttattttcttttctttgctggatctgctgtcttcttttcctcccagttgtggcacctctagcttggggccctgttcttccatatgggcatcttttcttttttttgaggcagagtttcactcttgttgcccaggctggagtgcaatggcacgatcttggctcaccgcaacctccgcctcccaggtttgagtgattctcctgcctcagcctcccaagtagctgtgattacaggcatgcaccaccatgcccggctaattttgtatttctagtagagacggggtttctccttgttggtcaggctggtctcgaactcccgacctcaggtgttccgcctggcttggcctcccaaagtgctgagattacaggcgtgagccaccgtgcccggctatgggcatcttttcccacaggaattgacttaaaggacccatccattctgaactcttagtcctcatatttttattctaatgatttatatatcagtacctctagtccctgtgcttaaactgtgttctgctaccttacttagctccacggaggacagttcccatgagatgactcacttccttaattttgggagatcagaaattggaatcatcatcatccaaataaggaattctcacctgataaattttgtgagatttttctgtttctgggctcagaaacacagtcctctaatttaatttattactttggaattcttaccagtttttcttgttttaattaagaaaaaagtgaccctttttcttaatcccagtggtattacaacaaactagatccccattttctcatatttagacaattttgttcccagtgagatatgttgatttcaggtttttgagtttagtcaagatactgacagattttatgaccccaaacatggctattttgtttcttttttcctcagtagatatgataaaaacaggcagttctatttcctactgtgtaggattaacaaattcttttcagtgatattgtcctcatggccacatatttccaatttaaaaatatacctgaatagttttcatcactcatgctctgctccattgtttttgtatgttgtttaatgtctactccatagaatgattcactttgcatacactctgctgattactttgtactttcttaatcttcattatatcaatgtttagcatgaggaaaccattgtatttaagatataggattaggatttttgtatttaggatacagaaattactgattttctgaaaatgggcagaaaagaatatttcacagtattttaaaaggatgctttaaatatttgctgagataaattcaaaagaacggagattgtatttggatggagaggacaatggcattaaatgttaaaagtattagcctttgtgcatcaatcatgtctatttcatggaaggctactcaaaaagtaagtgtatcaacatgggaagcatggatagcaaatgctggtgaagttcagaaaaatgatgtcagcctagaggtggagtgacattgggaattaattttaagggcatagtacctataactggttcaagaagccattttgaattgaaacaaagaagcagatgaagcaagcttaatgggaatagaggacatgagagtgtgcttggatttgagaataaattggacttcttttttgcaatcgacattgttaggctgtgttggagagttgtggaaaagcttttcagtacagttctgatagtttacattgaacattttgggcagtaatttaagtgttaccaggttcagcaagatttttatgacctgaataaagtgagaagttaaaaatgtttcagatcgctgcctggggacacagtggaagattgccagaataaatgaccacctgtatatgggtaaaattgctatttaagagtgaaaaatgaaatagaaaacaacctattttaataagtgggaaaaggatgtgaatagacatgtcttcaaagatgatatacaagtggccaataataggaaaaaatgctcaacttcactaattatgtgggaaatgcaaatcaaaaccactgggtgatatccctttacatccattagaatggctacaattaaaaaaacagaataacaagtgttggcaaggatatagagaaactggaatccttgtgtattactagtgggaatgtaaaatggtgtagtcctatggaaaacaggatgatgatttctcaaaaattaaacataaaattaccatatgatccagcaactccacttctgggtagatacccacaagaattgaaagcaaggacccaaacagctgtttgtacactcttgttcatagcagcactattcacaatatccaaaaagtggaattgtccattgaccaatgaattggtaaacaaaatgtggtctatacatacaatgaaatattattcagccttaaaaaggaagaggaattatgaaacatgttgcagtgcggatgaatcttatcatgatgctaagtgaataagccagacacaaaaaatccaaatgtatcattctacctgtatgaggtactttaagtagtcaattcatagagacagaataagattgtggctgccagagaatgagggatgggggaaaagggaaattgtttaatggatacagcatttcagttttgcaagatgtaaaagttttggagatccattgcacaacagggtgaatacaggtagcactactgaactgtacaatacaaaatgggcaagatggtaaatgtaatattatgcacttttgctacaataagaaaaagttaacaataaagattaaaagtgtcctttttttaaaaaaagaatgaaagatgattgagtttttttgataggacaagagtctgggatacagtttaagtgactgaaagcgaaaagaaactacatgtgatgttcatactcagtattaaaatctggtagaaaaagtaatagtaaaatttagtaactattatttttattgagaacctgctgtgttttgtgcagtatactagtaaagtgcacaggatgatcagggactcttattcttggcaaaaaaacaaaacaaaacaaaaaactaaactaaaaaaggcatatttgatagcataaagccaaaagttctaacaaagaacaattaatttcaatggaacaagggtgaaacaaattctggggaacagcttgcttgtccagtcttttagaatatatttctggggatatgggtatattcctaagttcaagaaaaaaaaattgtagcttcatggagagttgaggcataggagagttgaggcatagtcattctttcactggttggccatgtcaagataggtgaagctttaatagttttcagaaggatatacagggctgatggacttggcattgtttctaacaagtaagataaagcaggcagattggtgaggattcatctctgaaagttaatgaagacctacacactgagccccctccttcaagccttggctgcccacacatgttgccctgcaacacttgtctgttttatcctactcatcctactagatctgggtgtctagaccacttgcataagtgtcctcaggttgttgaaatctaatccccacagattagcaaagtgatcttggccaattacataaccattatgtgcttccttttctttgtaaaacaggaacacccatcatcgctacctcctgaggttattatgcagattaaatgagtatgtgtgcaccatgtaggccactgcctggcacatgctaagtgctatgtagataaatgctcatcatgtaataagggctctgtgtttctgctcattgtcagcatcattagcagcattattacatgactcagcaatttccttgtgttctgtgtcaatcagcttcatgcagtttctcctctttcttgttcattgtgtctatttcatcttctctttctccttttagaaagggagtttgggcttgaaatcccacaaaaggagatttctaagaaagcttcatttcaaaaggatatggtaggtgagttcacaagagatggttcatggtgttccattttagaagaactgaggctggatgctgaccgcacaaagaaagatgagcaaaatcaaattcaacccatgagtcacagtgctttcttcaacaagaaaacattgaacacagaaagcaattgtgaatataaggaccctgggaaaatgattcgcacgaggccccaccttgcttcttcacagaaacaacctcagaaatgttgcttatttacagaaagtttgaagctgaacctagaagtgaacggtcagaatgaaagcaatgacacagaacagcttgatgacgttgttgggtctggtcagctattcagccatagctcttctgatgcctgcagcaagaatattcatacaggagagacattttgcaaaggtaaccagtgtagaaaagtctgtggccataaacagtcactcaagcaacatcaaattcatactcagaagaaaccagatggatgttctgaatgtggggggagcttcacccagaagtcacacctctttgcccaacagagaattcatagtgtaggaaacctccatgaatgtggcaaatgtggaaaagccttcatgccacaactaaaactcagtgtatatctgacagatcatacaggtgatataccctgtatatgcaaggaatgtgggaaggtctttattcagagatcagaattgcttacgcaccagaaaacacacactagaaagaagccctataaatgccatgactgtggaaaagcctttttccagatgttatctctcttcagacatcagagaactcacagtagagaaaaactctatgaatgcagtgaatgtggcaaaggcttctcccaaaactcaaccctcattatacatcagaaaattcatactggtgagagacagtatgcatgcagtgaatgtgggaaagcctttacccagaagtcaacactcagcttgcaccagagaatccactcagggcagaagtcctatgtgtgtatcgaatgcgggcaggccttcatccagaaggcacacctgattgtccatcaaagaagccacacaggagaaaaaccttatcagtgccacaactgtgggaaatccttcatttccaagtcacagcttgatatacatcatcgaattcatacaggggagaaaccttatgaatgcagtgactgtggaaaaaccttcacccaaaagtcacacctgaatatacaccagaaaattcatactggagaaagacaccatgtatgcagtgaatgcgggaaagccttcaaccagaagtcaatactcagcatgcatcagagaattcacaccggagagaagccttacaaatgcagtgaatgtgggaaagccttcacttctaagtctcaattcaaagagcatcagcgaattcacacgggtgagaaaccctatgtgtgcactgaatgtgggaaggccttcaacggcaggtcaaatttccataaacatcaaataactcacactagagagaggccttttgtctgttacaaatgtgggaaggcttttgtccagaaatcagagttgattacccatcaaagaactcacatgggagagaaaccctatgaatgccttgactgtgggaaatcgttcagtaagaaaccacaactcaaggtgcatcagcgaattcacacgggagaaagaccttatgtgtgttctgaatgtggaaaggccttcaacaacaggtcaaacttcaataaacaccaaacaactcataccagagacaaatcttacaaatgcagttattctgtgaaaggctttaccaagcaatgaattcctagtgcatcagcatattcataaatgaaatatactccgagtttcttgaagaagagaaaatcttctcagaatcaggtctaattatatgttattgaattcatgcttcagaaaaactctagggatgcactgcatgtgtgaacacatgataaaaaagtcatgctttattttagtgagggcaattacagagaaaagagtaagcagaaatgtccttctgagtactggcctcattaaggattataaattttctccccgggaagaaaccctgactaacgcattgagaaaagcctttctgtaaagaatggtacaagacaggttgttactcgattatttatagtaaaatatgtgggaaattatatcaatgataaccctgtttattgtgggatatcaatatttttaaagtgccaacacagtcatgataggacaatattttatgtgtgtgtgtgcgccttatgtatataagcatatatataatatataagcatattattatatacaggttgagtatcccttctccaaaatgcctgggatcagaagcattttggatttcagatacttacagattttggaatatttgcattatatttattggttgagcatccctaatctgaaaatccaagattaaatgctccaattagcatttcctttgagcgtcatgttagagttcaaaaagtttcagattttgggttttcagattaggaatacccaacctgtatgtacgtatatttctgtatctatgtatgtatatatatgcatatgcagacatatgtatatggtctggtcagcatatgtgtatgtatgcgtatgtatgtatgtatgtatgccctcagtgcagtggggtttgctgcagaattcactgcatagcaggagatgtaagcagatgagttattttttaagagaatctaatctaattgtttttataaaaattattccctattgaatatttatataatgaggttgtatcaacaatgattaactcctttattatacatacacatgaatgtgcatttttggtaaatgcataaatgagattctataatgtttactgatctttatattacagattttctcttcttttaggattagctcagcttgccccccctttccatctccaccatctatagtgagcctctccataattagtgccaaccattagtctcgttcatatttttacaccaggagtcaacaaactgtggccattggccaaatatggcctcccaactgtttttttaaaataaagttttattggaacacagccatgttcatttggacatgtattgtctgggcttcttttgtgctgcactggcagaattgagtagttttggcggagatcaaatagcccccaagctggaaactgaaaatatctactctctggctctttacagaaaatgtttgccagcacatgatacacacacaaacacacacacatacacacatattactatgttcatcatcatatacctgtgtaagtactctttcattgatttataaaactcagatctcttacgtgtgtggatggtatttttttcattctacaatccatgatggattgtacacacgtgtattctatgaggttgacctgccataatttatttagccattcccacagttttgattacttatttcctccccacacacattttttgctaaaaaacggagagggaactgttatcaatacttccgagaagcagaccagcataatcttttaagtgcacaggcccaggagccaggttcctgcatttgattcctggctccactctctaccctctgcatctgctgagcaagttatttggtctcatctattctggttttctcatctacaaaagggagatgatgatagtaccctacccccatgcatttggtgtgagaagtgtgtgtgtgttaaacccttggaactgcatggacagaccaagtgctgatgaattttagcgggcctcgtatccctgagcctgcctggttcccttgtgctgggtgtgggactgtggtgggagatttctgtcagctggaagtcttttccagaagggtgttagagatgggcacccatggctttagtctccataccccttcaaggttgataggggcccacacagctggtcaggaaccagcacagacctcaggctgtgtctaaaacaaggtgactgcacatgcaggagcctgtgctgggccctggagagcaaatctgttctgtgtctcactggcctctccctgtccaggggcgtagtatcagtgaccatgtcccacctcctgagaaaggtggaagagtctcacctggggagtccaggtacaagggctggccggccgtagatgactggtgtggggtggaaaggctgcagaggcctctccatggtggtgaggggtggaaatagtgtgcacctgggtcctgggagtggcaccctgaccagtttcagggaggaaggtggcagggccctaggacaagtgtgttaaaaacttgagcccacagtgtagacacactggttccaaagacccctcaggatgtgcctcccttctcagatctgggctttccctgttcctaagcatcacctggggggatcactctgggtcctcatctccagccacatgttcactcctcacgtgggcctccctaactgtccccctcagggcaagcccttcctccccacttccagaaagctgctcgttccctggccatcccacacctctgacctcgtgccacttccggggcctgttggctttaacaacttagtttcctccctacctcgcaaccccctctgtctagagtgctcacctccctcccagcctctgtctcatactattttttctttcctctcagtaccaagcgctgggacaagccagtctgtactcaatgcctgtgggataatagacggaggaatctggagtttggttgggtgattagctttggaattgatgggtcccagggagctatctaaagttttcagtcacatgagggcatgctcacagatctgtgaaaagatctgttggctcagagaactaagagatgaataaatgttagtccaatggcctcatcatgagatgagaggtcaagagttttgagtttccagagggagaagctactattctaggcagcttgtatgaactaactcgtttattcctcacagccattgtaggaaataatctaacctcataaaccccattttagagatgaggaaacaggcttagagaatttgacgtaaactcaagaccgaaaatctaggaacaagaaaagcctggatttgaaccaagctatctgatgccagtgttttaactctcaaccattgtactactttacctcctcatgaccttttttttttttttcttgtgagatggagtctcgctctgtcgcccaggctctggagtgcagtggcacgatctcagctcactgcaagctccgcctcccgggttcacgccattctcctgcctcagcctcccgagtagctgggactacaggcgcccaccaccatgcctggctaattttttgtatttttagtagagacggggtttcaccgtgttggccaggatggtctcgatctcctgacctcgtgatccccccccctcggcctcccaaagtgcccatgacctttttattgttgggcagtgaaagccatggtgaaatgaagaatgtcctactgtcatgtgatgtgatcagaaaacatactgcccagagtcccctgcccccacccccaaaaccagtacttgatccatcctttgactgttgtggcgattggcacaaaggttgggcacagtagtagttaggctcatgggctctggagccaacctacctggatgctacacatcccagctctgcccctcgctagtttggtggcaagcaacttaacctctctgccttaatttctccagcagcacaatgggaataataatagatctcgccttgtggctcctttgcagattacatgcgttaattatgtaaagtcaagcattagaatggtggctgtccaccatgagtacaacacaaatgctcgttcttaatgattcaacaaacatggaatttcattaaatctgaaataaaggtattttgagaaattgaattccgttatcaagtgtgaagtcctgatccagactcacctcgtgcacactatttaccacaaaggtggactccctattttaaatgcattcacttaaagagacctttccctgtactaattagtgtttgttaagaaggaccttctggacatagttgaaagaaagagaaaagaagcaggtgtggggaggaggagaaggagaagggaggaagggagggaggggaaagaagatggatggacagatggaaggaaggaattagggatggcagaaaggagataaaataaactctacttttaaaagaaaccaggtggggtgagtgggagggcttccctgtgaccttggcctcaggggctctttctggcttccagataagatacccctcagctttgcactgggtctcctgaggcttggaagttatgtccacagtgaggttggtgtagaggggcagccactctttggagagcaacctgtagcccagacagttgatgccatcatcagaggatccagggatcggaggattggcggatccgggacagaaggcgaggcctggaggatggggaggggcagccatgtgagcctcagggaggacccagaaccaaccaccccacttccaacactgattcacctccagggcctctgcttgtggccaggatcttccccctccagcatatggtagcctctgaaaagcaggtggggctgggagaggagcatcccgcttagtttcacccttccagagacacaggaaggcatggaggccaaacacctgtctctgacagggtccccatgccacagcccagccctccagtccagggtagcccatgtccccctcagcccagggcggcccatacctgcctcatcatgtcaggacctgcagctcctgcctcccacctggcagtgatgtcatcctcatcatcccaaccccactacacgttggagaagccatttatcttcaggtagtgagtggggtgcagggcaaacacccctccaaggcacaagctaacggcttaattgctgttgtttccccatgttctggcttgcagcacttgtaacctctgggctcctgcagcccttaacatctgatacctttacattaagatttatcatccttatctctggaccaggctgaatacacctgtgtcccggtgcatctggccagcgggtcaaagggcctagcacacagattaacaaatgaatgagttccagttaccaaagttcaatccttgaggtggacagaagacgcccaaggcgtgtctcccatcacccttcactctcaatcctccttatcaagggcctcacgggaatagtgataagatctcagaatatacaggagggagcagtttcgggaaggggggcattggaaggaagtggagggcttggatctggggagcaagcggggagagtgctccgttccttggttttgggatcttgccttacgggtctcacctgccctccatcctggcttccacctggcagggtgtgtttgtgtcagaaagacgattgtgcgtaactgttcaccgcgtccacgtcccgagagttgcgcacgcgtggagatctgcaaaacgctccctttcagctccgcgcatgcacagagaccccaccccgcaagtccttgcccttcggcctgggcaggcgtccactcccatggctgcagggcgcgccgaagagcccactctgcatccccgagacgcggcccaatcctaggaatgtgcttagcgcaggtgctatcttcccttttcacattcccaatctctttctccgccccctcaaactcttgccatactcccacaacagcagaaaatctgaaaaaaaagtccatcccatctttgcactgacagcagtgcacagcagctggcagagaattctggcacggctattgtgcttgcgcaggcgcagacgggaagcgggccggaccggcctagtacactctgggaggcgtgcgcagaatgcgcagcgctgccgcgaggatctctgggaactgtaggcccagtttgtccgagagccgcaagtgtttcgggacgacgcaacgcaggggcacctgggagtcgtaggcggatgggcccaaagccttccgggagtcgtagtccttccgcccgctcctcgtttctttggaggttggcccttccagctccagttctgcccaggtgagcgcccatcccgcggccggccggtcctggccctttgtcgcgatgacgtggcggagttgagggtctctgtatttctctcccccgcgttctggtaggcgtccctggaaagatggcacccttttccgtgatctctcaatccctctctccgggtgggagtgctctaagcagctgttgtacctgctgacccgctttggattctgcggcccagcctgacaccttctcactctcgcccttcaacctgggtgcagtgcgagtgcaccctcctctgtcctggttacaacacagagtggtcagggctggcccagggggtgctcaggaggctgtgggaacacagaggaggtgctagacccagcccagggttcaggaaagaccttacagagcaaaggacctcaaatctaccacatccaaacgaaatcccagattccctgtcctaaacctgctcctctcacaatctttctgcctcctccccactaactgtccatccaagtgctcaagccaaaatcttggaatggtcgccagtgttctgtttctctcatccgcttccctcccgcaaccaaatcttgtgtgagtctcatcgtctctatctccagaagaggcccagaatctaaccacttctctccacttccactgtctccattctgctccgagctaccgttactcctcacctgcatcactgcaggggcctcctcactgttctgtttcttcccttgccacactccaccctctattcaggcacagtgccaggaagcctgtggaaatataaatcagatcctgtcaccagtcactaccctgccccccagcttaaaatcatccagtggttcccatctcagaataaaatccaagctccttatcctgccaacctctaagcttctggtcctttctggtcgtcctcagtcacaacacactttccaatgggctgaacacagccaggccctgcccttcatgtcctttgcatttgctattaactcaatttggagcattcttcccaccctgacccaatatctgtctactcattttgttggcctcagctcaaaggcctccagccaccctaaagaaccccctccctgttcccccccccccagtcataccaccaaagataattccctcgtatttggaaagcatcttagtcatttacttccttatccatggcctggttcctccattagaacatcagtgccctgacagctgcaacctttcctatcttgctcactgctgtgtcccagtacctagagcatgctgggtacataggcggcactcagtgggtatttgttaaatgaatgaatgaaagtttgagctgagacttgaaggtaagagttaggtctaccacagtgtttagggaagtgtcttgcgcaatgagatcagcctggccaaagatgcaaggggttgaaaaaccaatgggaagttcatctggctgaggtgagtaggtaactaaaacagggatgcaactggatctgataaggacctcaggaagtgaaccccagtactaggtgactgcagattcagaggttgaaaaagctgagttgtcttccatagagaagctgggtgaaaggtggtgttgcttccgggagacggggagcttggttaggtaagtttctgccttggggtgtgagagctggtcagttgggcactgagatatgagaggcctagatgggatcttccgtggggcatttggagggccaggctggtggacattgcgattcagagtcacccacaaacagaatgagaagaggggtgatgggcaggatatgaggactgtgaagaggcctccccagaagatattaagcaggaggcaaaaaacaagaacaaagagggaggactaaatcaaaagctgtgggagaaagtatttcaaaggggactttgctccgctgtgacagatgtacctgacatcaccgcagttgagtcctgagggctgcttgatggctcagtgacagggaagagtgctttgggcaaagagaagagccagtgaaaacaactagagacaagagtgttcctgggggtactcaagagtagacaccagtaagcaagaaggagagtggaaggagatgaggacagagaaacaaggagccagagcctgtagggcctcgtcggccattagcagttacattttgttttttgtttttttgagacagagtctcgctctgtcacccaggctggagtgcaatggcacgatctcggctcactgcaacctccgcctcccaggttcaagcaattctctgcctcagcctcccaagtagctgggattacaggtgcccaccaccatgcccagctaatttttttgtatttttagtagagacagggtttcaccatcttggccagactggtcttgaactcctgaccttgtgatccacccgcttcggcttcccaaagtcctgggattacaggcgtgagccactgtgcccagccagtagttactaaagtgagatgagatgcagggcaggatcccactggctgttatatgaaggagtgtgtgtggaggaggcaaggcagggagcatggagacctgtgaggagccccctgcagccatctaggagagaggcagacctgactagggtgctgccatggagatggtcagaagtgtttggctgttttgaagctatagtcaaacaatatgtgtgacttttcatttgagcacctggagtttgaaagggtccggacttagcattgcaatttggctccacccactgggagagtgacaactgtagtgatagaaagagcagtccagggtcctggaccccaaagcttctggcctgagcagctggaagggatggagctgccctgtactccaggagaagcccgttaggttagaggaatcaggaatttgggttttgagatgcttattagacatctgagtggcactggtctttacttgcatgtaagttagagacggtaaatacacagtcatatgaaataattccacacattgtggtaaatcctagaagcagcgtgacctgctctgaatggcaaggatgtgacggcagtagtgcaggctggaggtggtggtggcttgaggagggggactaagcctggggagtttttatgggttcaccagacaagtgggacgaaggaggttcgatgggacagttagagtcttggctgggtggggagggatgaggtaggaaagagaacagttgggggccaaggatgagccaaccccatcactgacccctcccctcccaacctctctgtgtctttcgggggccacagaagcttaggtggattctgataccagagcggggttaagttcagaactggaggcctacacaccctcacctcaaaaataggtgcaacccctgctagtctccctagaggttgatctagcctgcctgtgtatgtccttgtaagacacaatcaggacccattcctggagacagaatgcccaccccgacccctgaaagtgaaatccaattggtcttttctgtatagcccccttcccttgaacagagcatgacctccctctgtccttaagagtctctgacccctcccctcccaatctctctgaatagtcagtaatatctaccttctgatcagggctgtaacatgggtggcctcctggaagttgttacaactggtccttaatagacgccctcacccctttggacaggacacgatctaattctgggtataacctgcttgttgctccctctttttccccctgaaatcagcttaagttccttctcttcttggtgcataatgggtgcagtccaggaagccttcctggaggcagtggccttcttacaccagaacccatttataacccacgtatataagagcagcagccacagctgcccctggtctattccaggcaggggcactatctagggaactcctcaaaggcaatgaaacatgtgtaacccgcctcctctcccggtctaggagaagctgtcccttcttgcaatgcccgccccgtcatgtgcctcctgccacgtggcatgcgcctccctccgccgtccatgctcgggccaagtgctgtgcggttcctgcttctgcaccgccttcgaggcggaggtgcagcacatggtgcttgtgggctacctgctgccgccaggcgcagtggtggccctgggcacctcgggcggcaaggattccacggtgctggcacacgtgctgcgcacgctggcaccgggcctgggcatcttactgcagctcatggctgtagacaagggcatcgggcgtggcttagcgggaggatcccagtaaggagctggggaaatacgcatgtgcctatttagggccggagcctactgaaggctcatgtgggtagtacgtgtggctccctacgatggagtaaggcaggtttttcaagcctctgggtctctgacatcatcttagtgagagatgaagctggctgggcttctgggtcaggtgggcacttggagaacttttccgtccagctaaaagattgtaaacacaccaatcagtgctctgtgtctagctaaaggtttgtaaacgcaccaatcagcactctataaaaccagaccaatcagcactctgtaaaaccagaccaataagcactctgtaaaatggaccaatcagcgctctgtaaaatgaaccaatcagtgctctgtaaaatggaccaatcagcagaatgtgggtggggccaaataagggaataaaagctagccaccgagcctgcagcggcaactcatttgggtcccctcccacgctgtgggagatttgtgcttttgctcttcacaataaatcttgctgcagctcgctctttgggtccgcactacctttatgagctgtaacactgcgaaggtctgcggtttcactcctgaagtcagcgagaccaagaacccaggggaaggaaccaattctggacacattggtacacacattggcaggtagaggggctaccttgtaggagctaaggctggaatactctgctatcattattattattattattattattttgagatggagtctcactatgtcacctaggatggagcgcagtggtgcagtctaggctcactgcaacctccgtgtgccaggttaaaacgattctcctacctcagtctcctgagtagctgggcttacaggtgcctgccaccacacctgggtaatttttctatttttagtagagggaaatgactttgtatctcccttcacaaagagagatgtgaagaggtgtctctcatcgaaagtcacacagtctgaaatgctactgtgtctcttaactccttttctttataggtttctctctgacaactcttattttctctcaatgattacttcaataagtaatcatcgtccattgactaaataccagatacaagctgtgtagcctagagcaaattacttaacctccgtttcatcttttgtaaaatggggatgttaataatatctgggtccttgagttgggaattagatgagttatatataaagcactcagactagaggctgaaaaacagtaaacatgatgtaaatgtttgctgttatgatgatccacaagagcacaagacagtctctgctcctgcctgattctcacgaatgtaattataacctgacgagtgctactacggaaaattacacagaatgtgtgaatttatatcagggggtactagtggcggggaaaaggtggggattaaggaaacgtttcctgagtgaactgagacccgaaggctcagtgaataaccaggtgaaggatgagttggagtttgggcggggggtgttctgagctgaggtcacagagaggcaaaggccttgaggaggggaaatatgaccaacttgagaagcccgaagaagaacagcattttaatatacagactcaagtataagatgacaaaatgcagaataaacgtagtttccatttaaattgtatggcgactggtgtgtatgtattcattaactttctttctggtctttgtaaatcgcgtgatctgcattcccagagacacttgtgtctacagctctcttgagaatccccattagatggcccttttttctcctgtgtagtctgaaatacagttttaactgaggctgaaatggtgtttgcagcttaaagcacttttacccgctatgtggaaagagagctagcgaagggcttggtatacagtaggtggatggcaaatgagggctccccccaaggagcttgtttgtgttcccttcaggttttctgtccacctccagtctccttctggttgctccatggtgcccgggagtctccatggtccggtttccccatcagtatctgttccccctccccctgcccctctctgtcttgggtcctggcggccccgctgtgccctgggtctcccttccccgtctctctctgggtcctggttacccacagtgtcccaggggtctccatggctctgtctccccctctctgtctctggatcctggctgttgcacattgttcggaggtctccatggctcgctctccccgtcgccgtctctctctctgggacctggcggccccactgtgccctgggtctccgtgggtctcccctcccagtctctctctgggtcctggtggacccttggttcctcgaggggctccctggccagcagcgccctccgcgccgcacctcaccctctcccgtctctccccaccaggtcacaacgccgacgacatggtggacaccgtgctcatgaacttcctgcggggcggctggcccggggcgggggcctgggctctccgggctaggggggtgcccttccgcgctgccgcccgctgcagttcgcctcgcaggaggtggtgccgtacgggcacttccgccgcctcgactacttctcagaagagaggagcgcccgggacctgctcaagcgcctggaggcgccgcggccgtcggcggtgctggacctggtgcactcggccgaacgcctggcgctggcctcggccgcgcggcccccgcgccccggcgcctgcccccgctgtggggcgctggccagccgcgcgctctgccaggcctgctccctcctggacggcctgaaccgcggtcggccccgcctggccatcggcaagggccgccgggggctggacgaggaggcgacgccggggacgcccggggatccggcccgggcccccacttccgagaccgtccccaccttctagcgactccgggcctcccgccgggatccgacgcgcccgggtgaggtctgcctgtaaatgacactgtgaataaacccgttaccttacctggccttccatgtgaggtgggagggggatgggggcccagtgacctgaaaccctgaagctgggaccccagacttcggggtctcagggaggaagggtctcgagctggccttctggctctgagggaggagggggctggggggccatcctaggtctgagagaggagaggaccaggactagggctagaggaagtggggctggggaccccaggcatctgtggctgaggaaggagggcctggggtcgtggactcctggatctcagggaggagggggctgaacaccttgtgattcctgagcgagtgggggttggttggggacctcctgcccagttctctgctggttctgggtgcgctcagcatggtcctgaccctccttgagcaccagattcctgatgtttcctgtttgcccgcagtggggtaagcggagtgacgtgacttgatggacacacgccattcacagcccccgtcacgatgcctcccttccagcgcttcgtgtgcagcgcgtgctgcaccctcatttcgtctcctccacggcctcactggcagtagcctgagccgcagtaactgacctgggggctcccaccaggttggcctggctccagagctgtcagagattttgggattgcctttcccccatgctatcctgtcctcatccatcaccacctgaatctcccttgccgtctcttgtcataggtaaggaggggctggtgggctttgcagacctctcaagctctgaaggcagagctgcgcgagcctgaatcgccgcttaactcttctgaccttctatttcctcctctgaaaatagaagcaaccctccctctccactcccccgacatcagggtactcttgggaggattcagtaacttggttgttcatattaaggtttggccaccagggagcttttagtttcaggattgctgctcagctggtcctgaaaggagtgaggcccagaaacttcctgcctaacctgtgggagatttggtgttctcagtcccacctccgagctttgctggcttgcctccctagtcaggaatgccttccctttcccatctgcctgctcaaaccctccagggtccttacagaaagaggaccttcctgattctcccctcccacccagtccagggcgtagggatctcccaaaccccaccccataggtcccccacccataggtcctgtcctgactctgtggccttcccaccgttttgggttatgctctccctaattagactgatcattaagggcaaagaccagacctctctccccatcggacaataacagcattattcatccaagaaacacttattgagcacctaatgtgtgcaggggctgttctaggcactggtgagagaaaaaagacagagtctttcatggaacttagggccttgtgggaaagacacctatataatgtcagataattagtgctgtagataagaaataacataaagggaaaaggtgtaaagagctgttattttagtttgaaaggccagggcctctttgagaaggtgactttggggcagagatcaaacaaagcaagcgaggtttctagccatgatagagaagctaatgtcagaacaacacttccacactaagactgagaccaaatggaaaaacagtacacacatacacacacaaaaacaatctgatgacattggagagctaccaagttggccaggatcgcagagaaaagggaagctcattctcctggaggggccaaaaggctaaggaagcaagcagaaagcagaggataagaagatgggaacctgagttgagctttcagcagtgttatggctggggctggagacagaaatcatggtggccaggtgcagtggctcatgcctataatcccagcactttggggtgccaacgtgagaggatctcttgagctcaggagtttgaggccagcctgggcaacatacagagaccctgtctctacaaaaaaaaaaattaataaaattaaataaatacaaatagatcatggagcctggtgctaccaaggtagacaggacttgagggaccaaaaccctggaaggaagggaagatcactgaggtgagcccaacatgtttaaactctcctctcagcagtctgatggaactgggtaagccaaatttgatgttccgggtctgataaggagaggcccagtaaacaccccaaaccttccattagaactcaagaagggttacagattaaaagtaagggtcggccgggcgcagtggctcacacctgtaatcccagcactttgggaggccaaggtgggcggatcacgcggtcaggagatcgagaccatcctggctaacacggtgaaaccctgtctctactaaaaatacaaaaaattagccgggcgtggtggcgggcgcctgtagtcctagctactcaggaggctgaggcaggagaatggcgtgaactcaggaggtggagcttgcagtgagctgagatcgcgccactgcactccagcctgggaaacagagtgagactccgtcccccccgccaaaaaatatgggtcaactgggagtagacctgcccacaaaaagaccaaaacccatcttcaaactcactcagcctggggctggcttaagggatctgtccctattccacttgccagaaagcaaaaatagggtagccctagccacatgagccgatttatctttaaattaattaaaataaaattaaggattaagtcctcagtcaccctaaacacctttcaagtgctccttaccaccatattgaacaatgcagacacaatgcctccatcgtcatgaaagttccatcgcacagtgctgttctagactgtactagaatccagaggaggaaaatttcagtcagagctcaaaaaaatctctgcagtttttcaaacaaaatactagaaattcaactaaaaattaaaaagttgacaagcatgccaggagatatgacaaaattgttgaataccaagaggctgggcatcaagcacagatgtatttacaggtgttctagatatgagttttaggtatggactttaattgtcatcacgtaaaaacagatgctaaaatggagagtttcaccattgtattggattacatttttaaaagaaccattaaaattgtgaatgtgattaataataataaccaggcagaatggagtaactagtaccagacttaccctcctgctgtaaacaactataaaatagcataatgtattaggcagttttccctgctttgctccacatgcaggccatcttcccaattgccagccctggggatgaccaacaccagcctcaaatctaccaccacctgcttggctgtgtgcttacagaggtagtagctacgcaggcaacagttttccatagaactttctgagatccccctttgggggtcccatggtaacaatgggcatacttggcttttcatatatccctgcacgctctgtcttgcctacccacacctgttcttcaatggaactgcttaatgatgctctcatgatcatcctgccttctccaaagcatcactttccagctctaccacatttgcattaagttctaggtcctctagtgagcgctctattctcataaaactcttggctgctgtttccctggccacactcttgtctggtggagtgatgaaaacctatggagataattttaagctctgggtcacattatccttcttcagggcatatttactgttgcttgtggcaagccgaccacttcaatttgatcagatattgaggaaatttggtctggctttaatccttatgaggtatcatctagttccaactcatccttactctacaaggtcccaaccacagcactacagtgtttaccatggccctttttccttggcaagccctcagccataacttttatcattctatccccatgagattcaaatgttctacttagcttttcagtctatgcttggaatcagcaacctgtttcatccaaaggattgggttgtggaagacatgaaggaccctgagctgaaagcagaggacccagctcggggctgatccacaggccactcctggtaccataccctcctctgttccccaggtcctccctctccctgcaagtgctgacccagacacctgacattcacatcctaggtatcctggaatctgggtgcaatggggctctgacttccccatgtcagagcctgctgaggatataggacacccaagaactgttactgggaatgggtcaccctgagacacacctccctccacccccacacacacttattgtggttgtgatgatcagaagagcttgcaccttgcacttttctcactccaggatccccagatggacccagatccagttcgtggctattggttctggaagggggccatcctcacctggatcctccagtaccaaacataacagagtctaaaatgtgaaagaagaaggcaatggcaaatctaccttctctgaggcctccaaactcgcaactggccctcaaggatgagaggtgctcagatatgggacacgggaacacctaagctctctgtaagtagagtagtactctacctttcacatttagaggttatgttttctatttgtgacaatatctcactaaaagtcttctcctcatgagggaaaaatgtcatgctcccctccttcttggcatctctgttgctcagtgaaggtccccaaggaggtggaatcagcctacggttcttggtgtctcttctgcagcttttgacctggtctatttgtggaaataggaggatcatggaaatggaaatgttgacctcttccacaaaccaaaagacataggctcttctagagtaaacacaaaaatttcaagatgagagatcaaagcatgagaatacagaggcagtttgtcctgtaccacatcttcaaatctcagacctgcagcttctatcctgcatatttctccaagctgtaccccaaaatgatgacgaaggaccttctgtgaagtcacatttcctgcaatcctcttgtccctgcacctgcacagcaggggcaacagcagcatcttgggtttggaggggggtgagtctgggactcctgacatcgcctgatgagtctcttctacctggagatcaaggcagctacagaaagagcacagctagagacttttcctggattgagctgctccaagttcctctctctgttaggagtcctcttccctcaaacaactaccagggaagtgaaagctgacctccttttaccccaggcctactgataacctgttcagtgccccctgccatctcattcctcactcagatgttgcctcctccaggcatccattcctacctctcctcagaaaatgaatggggcatgccccacctcttctctgttcacttggaactcggagatctctctcagagcagaagagtgtaggagccctgaaactgaatcttctgcccctccacccatcacacaagaagtcacgagaaggtggaactgaaactcacctgcaaggggggcccttcatggtcagagacggtgactcagaactgaggccctggctccagcttcacactcgactgtgatgtttgtggtttttctggtgtcaatttgagttcagaaagtcactgaatttttgtatgtctcctcgcttattctcaggtttctgataagcccttcactcacaccttcagtgtgagttttgacttcttgacagttcctccagccctatgggcctcccatcttcacagtatttatcagatctctccctccttaacgcacatccattttaccctgacattgccttgcctgttctgcccttcatgacaactctctccatcctgtggtccactgaggccccaggatccttttcctagtctaaacacttactattcatgtagaatgaaggaaaacttagaatttatttctgtgacccctcagctccaaatataacttcacaaccagccttctaatagatccttcattccttcatttgagctgattcaggatttggcacagagtcaggtatggaaaaggatcacatatcatgttctgtttttcagaacaccatgacaggacaaataagggattcaaagcaagagcaaattatcaactcactggaaaaggaagggaggaagagatggagcctaccacatagaaggtttcctggaaggagtgagggcagagtcagcccagagaggcaaggatcccagtggcctgtgagaaatgcaccatctctctgaagttaagtcttctcttccctaaaatgagggggacttcagaagaagactgaggaggagtttgaatgtcctctgaccagcacctctgtcctgcagcacagaatgtaaccaactctgctttccaaccttcttacctctgcatttgagacaggacagagttctgctcccagggggcgctccacccgccatgcccgatttggggaacaactagcccagggttggcgctgtccatggttctgcaccacaactgtgctctgagttcaggaaactcccaactctgccatggacacgaatttacaagcacacggttctgagctgtaggccagcggggcacctaagtcagagaggcttcgaaaaggctgggtcccttttgggaaggagaggccagggaaagagacttatcgctgtgcttttcctctcactcctcttgttgagctaaggatcattcttttgaattgtagtaccggcctggctaagggacagggaagaacaaggtatttttctgaagttccagattatgctgatgttgctggctcttggaccacgctttaagtagcaagtccgtgcctggatctcctctcggataagggtttaggaaagagatggacattcactgaagctccccaagttccagactcagggctgtgcttttctatatatgcctcatttaatcttcataaccaacctaagagaggtttggttaataattctcatttgacagagtgggaaacagagactggatgtatacgcgatttcatggggtctcacattattggtgcatatatatatgtgtgtgtgtgtgtgtgtgtgtgtgtgtgtatattttttttctttttttttttttttgagacaaagtctcactctgtcacccatgctggactgcagtgtcatgatctcagctcactgcagtctcaacctccagggcacaagtgatcctcccatctcagcctcctgagtagctgggaccacaggcacctgccaccatgcccaactcatttttgtttattttttgtagagatgggttcttactatgttgcccaggctcttcttgaactcctgggctcaagcgatcatcccatctcagccttccaagtagctaggaccacaggtgtgtgcttccatgcccactaacttttttttctttttgtagagacagggtctcactacattgccagactcgttccaaacacctgggctcaagtgatcctcctgcctcactctcccaaagtgctgggattacaggcatgagccactgagcctggtgatattttccactgtgatgttgtcaaatctatcaagatttttggtaagaaggatgagtttttattaactttttgtcataatctccttaaagaaaattattttttcttcaaaaaatttaagaaaagatgactatcagaagatcagacatttcctagcttgcaatatttttccatgtttgtgttatcagaaatatacttaccattcacattgtgtgatcatctgttatgctgagaaatagaacatgcgggcaccccaggaatcttagaacccctctttgtttcccaccctccctgaccttcttatgagtaccaccttgctgatatttgggattatccttttccctgcctttgcccataagcataatacctgtgtatatatttttaagcaagaataattgctttaaacattcacacaaatggaacaatgtggtaatgtgtattttgtatggccaaataggactgcactagctttccttttattaatgtcggcataatatactttcacttttggccttctctatccttgtactttacgtgtatatgttgtaaagatcatatacttggaatccatccaagtggactctgttttaaactgaagcatttatccaattatatttaacataaatatcccatgttatattttgttttctgtatgtgtcaccaattctacattactttatttctccgttttgtttgtttgttttgtttactaagtaattttgttgttgtttggctttttgtttgttttttgagacaaggtctcactctatcactcggcttactgcagtctccaccttccgggctcaggtgatcctcctgtctcggcctcccaagtagctgggactacaggcatatgctaccatgcctggctaaattttttgtacttttttgtagaggtgtgttttgccatgttgcctaggctattcttgaactcctgggctcaagtgattctccacccctcggcctctcgaagtgctaggattacaggtgtgagccactgcgcctggctggtttactaagtttttaatagtatacctttagtgatcactaggttgaaagttatatattatgattctgttcttttagccgtcatgagaaaaatttacagcatgccttattaacctatcaaagtctttagtaaatgaaaacctctctctcctcctggataatatatggatattgggacatgtaaaatacacttaccttggtacttaactattgtgattgtcaggaattctaaactatcttttgtttttattaaagctcccccatttacttgctctgaaagatcattattgctttctcatttttgagttgactttactgagtatagattgcaaattgatgttagaaatagtatttgccttcttctactctccaggttgctactgataattcagttgtcaattaaatgacttttcttttgaaggtgatcctttttctctggtagctgttcagatttttttccttgtcttcagttttgattcagccttaccttgacacaaacccaatgtagggatggtctcttttgacatttgcaacctttcgctgggccacagacttaaccttcatttccagagccacatgcaagaccaaagaaccaaagcttcctttttcaatatgagcaaatgcccctgggaattttggcttagtgattctgcttacttctctgggttcagcctttccccagaattttggcctaagtttccattttcttttcaggcattctatactatttaagggaaggattctttttctactcattttttccccaaaagattttattattttcaacacaaggcttgatcaaaattatctaacctgtcataaccaaaacagtagtcacaattcaccttctttacagtgatgaaaatgaagtttgggtggtagatattgagaatcaatgtcctcccagtactccactggaattatccactcatttcctcatgaccacttgctgaagtttctaacattgtcatttatctgggtttggagataccctagataagtaactggagaatttttagctgcttttggtttagcattttaaaaaataaattagttcaattttagaggagggagagtataagttctttcttcagtccactcttccaactcaagaccacccattaactcatgtttggaggaaaagatagtgtaagccagatgaaagcaaggaggcatggcttccaggaggaggaatctcaaattgcaaagacagtgtggtatgaaccagcatgaaaggcttaaggaagggttaggcaagaggaaagtataaatgaatagatagcagggagatcatgaaggactttatgtgtcaggggagatgcttgtgatatattgtctaaggccagggggccgtgaatgggtttgggcaggaaagagttagactcaactctttggctgttggaaggattcctatgggtctcataaatgaaggactggagccaaaggaatatgatgcaaggattgcaggtaaaagtgggcaaagatatgactctggcaaggatataagatcccacatcatgaaccaagtgccaggctgaggggctggtctttcctagggagtcttcgaagagttttgggaaggggagtgacaccaacatattgctgccctgttttttgtgcctggtcatccccagccttgagagaacttgccagcaggacctttctattcaaggaagagagaccagaaagcactgagcacaacgccctgttccaggacccatgttggttgatttccatgtgttgatttctttaatgttcacaacaacctttgaggtagcatgcatgatctctgatttacagaatgggaaactgaggcacagagggatgcagtgaattgcttgatgacagtgccagggcctagatttgagcccacctctctaattccatctgcttggagcacttaaacatcagttaatgttaacattgccacaagggctcttcgtgcttcagcaagtggtccctgacttgtcctttcccccagacaggctgtggctcctccagccaggactgaactctgggcaaatcctcacttgcttgtcttgatctccgagtactccgtggtgcttggggcctcctggtccttaggctccctcgacttcatctcagaaaaactaagggaggcataatggagctccttttgttcttccaagggaggggcatccccaggaggagatgcttgatctccggggctgtctggccagggcttcttcctggaaccctgagtaaaggggaaggaaaggtgtcacagtaggaataaagaggcaggtgtagaataatgagttcttatatttatatgttgccttgggatttattttgaatgtaagttggactttctcatgccagaagcagggcttagtcacctggacacaatttccaattctctacctcctcccagttccccaaggtggttaatccaaatgtctgccttatacaaccatctccttgtgaccagctccctatgggacatacagctacaacctacttgacttacgtattgactcctgtgtccctcataggctgcgcagatatactgcagcaaccacctctcagtcacagtgtggctccacagaactcctgcctgctagctctaaacccccagttagaactccctgtgggaagcctgcttagattatgccctggactctaattaaggctttggctcatgggttcttctctctctctctctctctcttgccccctacccactggatgagcacttgcgtcctggtcagttccctcctttccattcgcccttccaggcttgctgtgctatcttctctctgggacctgtgagtaataaactgcttctgttatttcatgtgttttgttgtgctgtctcctctgtgtcccacccgcccaacagacctgaacctcacttcttttctggtcaaggctctcctagagaatagctgtcttggtgggaataaaccggacacaggtcataggaaagctgcaagggaatctgccaggataaacaagtttgctgtgagagggggtcacaggctgggcactcaggcagcaggtggtgtgccaggataaaggagtattctgtgaaagtcacactgtgaacatgatggccagatctctggggttcccattcaaggccgggctagattttatgaccactccccaaagagagacctcaacaccaaataagagaaaaatacaacaaatggttcccacagggaagttgggctgatgtgacatttatcaattcatccttttataatccactcctcctaaggacaggccataggctgcctaggtcagggtctatgtctgatttctcacactgtacgtgcccaggaaccggcacagggcagacagggctgggttcaaatcccggccccacctgtccatatacatttcctgtgaactcaactattcgctcattctttcaaaattttgtaatactatgattgatcagaccatattgaggacttactaatcacattgaatcatcaccaaaaaaaaacccacaacagtataaaagatattctaattatccccaccttacacacagggaaactgaggtggagagaggttaagtagcttgcccagggttattcatctaatacatggcgaggccaggattcgaactcagccctgtctcccctgtttcaggttctgggcacgtacagtgtgagaaatcagacatagaccctgacctaggcaggaggagcggattattgatgaagcaaatgtataccttcggcataggttacaaggtgtcttatgtgcaaaccagaaaagagatggcaattctgatcctggacccagtttccatgaaagagaaacaaaatggagcagatcctgtccccagcaaagatggtaaccagatacaagtaagcaatttctttcctctcccaccttcacccatatccctacccatcacgctatggaaaatatgttgaaagcaacgtgagtcttcaaacagtagctcagaagttttctttttgagacagagtttcactctgtcatccaggctggagggcagtggtgtgatttcgtctcactgcaacctcccgtccctggctcaagcaatcctcccacctcagcttcctgagtagctgagaccacaggcacaagccaccatgcccagctaatttttgtaaagacagggtttcgccacgttacccaggttggtctcaaactcctgggctaagcgactggcccagcttagccttccagagtggtgggattacaggtgtgagccaccacacctggccatacagtttttttaaaaggactccgcagttagggaaaaatggcttcattgtgtcagaaaaaaatagactttctggagagagctgcttatattaggcacaagaaagatgaaataaaatgaaaaagtggctatgcacaccagcattatgcaggcaaaggaagaaataaagacatatgtctatcaataggtgtgcggtatatgaaataaaaagggtgaaattgacaactgaaagaaaaggcacagctcagattagtaaataggacaatgcagtatgttcaccctttcactcaatagctctttgctgagtgctttctttgggctagatgccgttcgtataaatgaggacataaagcagactgaaaccacccaaatacctccccgtcatgcagttccttgttagacagaaggaaaagtaatactgggtaacagttataagtgagctccctgtgagcttgccactttactaagcactccttgtaacaatccgagacagatactagcatattaataacccaatttctataggagaaaacaaaaaaacagagaggttcattagcttatccaaggtcacacagcttgcaagtgggtgaatctagaacctgaatgcaggacgtcaaactccagggaccatgctgtgcctcgctttaccattctgcctatggcatgaaagtgtgcagaatggttaaaggtaaaataaaggagaaaacaaagctctctctaccatagttcttgtcaaaagagtgaattcatacaccggctctgttctccaagacctaccaatgatggaactaaagatggagctcctgggtgaacaaaactttacaaatcaatttatgatcaatcaatcacactgatatccctaggggaaagttaaggctcatttgaagaaaaggggtgggagaactgggcggggggacagctggcttgttgagaggatgggttagcccaaacatacttgaattctgctcctttctctcctctacccttccagtgggacaaacattgtctgcccctcactgcagaattcagagtatggacaggattatgatgtgccagtgtccaacaggcatgtgttgggtaagcaccagaggcccactggggtgaggagaaggagaacggaggtggaagctcactggtctttgacattctccttgccattttctccactccaaactcccagggctggtggatcacaatgcaacgagagtccttgaccaatgttgcttctccacgagggtctgaagatggagggatgacttaagctgccttactggggtgataggaagtgggactggttgggtgtggtttgggttcttgaggggatccaccctggggcttgtcccagtcatttctctttttttgagacgatgcttcactgttgttgcccaggctggagtgcaatggcatgatctcggctcactgcaacctccacctcccaggttcaagagattcccctgcctcagcctcccgagtagctgggattacaggcatgtgccaccacacctggctaattttgtatttttagtagagacggagtttctccatgttggttgggctggcctcaaactcccgacctcaggtgatctgcccacctcggcctcccaaagtgctgggattataggcgtgagccaccgtgcccggcgtccctgtcatttctttggctcagtaagcctgacacaggccagcatctgcccttccctcattcaagaaacactgccagagtagccaataaccccaggggaatgtgagctcacagctcagaaggctgggcacctttgaagaaaagcaaaccaacagaacctgatagaccactagaagcacaagtactaggacgctttggtcaagaagctaaactgagcatattacatgcactaaaaagatgtggcaatattagcagcatgaaaacaagcataagaaactttgtcaataacaaagtgtgcatgcaaaatgaatgtgaaacataataaggaattatgtaattgtgtacttgatgcaaaaagggccatgtggaaatatctgaaaaatatcataggaagagcccaatggatgggatggagaatagaatgactataattgagggcaaattagtgagctagaagggccgtcagaagtatcccctaaaaggaagtagggaaggatgaagactagaacatatgagaaaaaggttaagatagatggaagatagaaatagaaaactggccaggcgtggtggctcatgcctgtaatcctagcactttggaaggccaaggcaggcagatcacttgaggtcaggagttcaagatcagcttggccgacatggcaaaatcctgtctctaaaaaaatacaaaaattagccaggcgtgatgatgtgcacctgtaatcccagctactcgggaggctgaggcacaagattcacttgaacccaggaggcagagattgcagtgagccgagattgtgccactgcactccagcctgggcaacagagtgagactgtcaaaaaaaaaaaacaaaaaaaaaaaacacttgaacatttagataataatagttttcaaataagataaaaaagaaataggccgggtgtggtggctcatgccagtactttgggaggccgaggctggcggatcacaaggtcaggagatcaagaccatcctggctaagacggtgaaaccccgtctctactaaaaatacaaaaaattagccgggcatggtggcgggcgcctgtagtcccaactactcggagggctgaggcaggagaatggcgtgaacccgggaggcggagcttgcagtgagaggagatcgcgccactgcactccagcctgggcgacagagcaagactccaccttaaaaaaaaaaaaaaagtagaaaaggaaaaatatttgaaaaaaatagtggaaacaaaatttccagagttaaagaagatgaaacacctcagctgaaagggccccacgagtgcaagaaaaaagatgcagggaatcccatgcctagacacaggacagtggatcttaagaatatcagaaccaaagagaaaattataaaagtttccagggaaaatgagtggattacctacaaatatgtgagattaagaatgacgtaagatgtcttaacagcaatactaaatgcaagaaacagtggggtggagtttaaagcaccaaaggaaaatcactttaattttagaatgtatatcctgccaaataaaattaaaatgtaaggggataaaatatatttccaggcatataagtcttcagaagccttgaggaacccaaactgaaaacccactggggggaagaattcaaataaaaagagagaaagagaaagaagaacagaaaatctgtgataagtatggaatagaaaggtgacaaaatacctcaacaaaatgtgtagctgtatattttttaaaaaatcaaataatagaaaaatgctaagtatgttcataataacacagaacaaaaactgcacatttgtagaaaatatcaacattgtaaagagttgaaggaagagaggccaagagatataaaagcgcaccaaaattctttttgttagatgtaagacagagatattaatttttttttgaggcgagagtcttgctatgttgctcatactagattcaaagtcctgggctcaagcgatgctcctacctcaccctcccaagtagctggaattacaggtatgcatcactgtgcccggcaagatattaagcttctaagtaagaaaggagaaaaatgaaatattgaaaaagtgggactaagtgaaagtaaaaggtaaaatagtagaaagaaatccacatatgtcagtaaccataataaataccagcagagtaaactcaacaagggatgtcaaattggattttttaaaacctggttatatactgtttacaaaaatcactggtagagcataaatacataaaatgttgggaggatgggagaaaatgaaaaagtatcaggcatctaactaatcaataagaaactagagtagctatattaagatccacatgccgcttcattccagcccgcatgagtgagtgagaccctgcctaaaaaaaaaaaaaaaaaaaaaaaaacatccagtcgaacagactttaaagcaaaaagcatcattatgagccgggcacagtggctcacacctgtaatcccagcactttgggaggacgaggtgggcagatcacttgagcccaggagttcaagaccagcccggtcaacatgataaaaccctgtctccactaaaaatacaaaaattacctgggcatggtggcgggcacctgtaatcccagctactcaggaggctgaagcaggagaattgcttgaacccaggaggtggaagttgcagtgagccgagatcgtgccactgcactgccgcctgggtgacagagtgagactctgtctccaaaaaaaaaaaaaaaaaaaaaaaagcaccactatgaagagaaagaattactatgtttgataaaatgttcagttcactgagaagatataatgcttttctaaaatatatggttttaatttaaaagtacatcaaatataagaaacacaattgttagaattacagtaagaaattgacaaatacattatcataatgtaagatttcaacacacctctctcaagtattgacatgttgggaagatctgttgacatctgaagatttggatttgaacattacaattaacacactggactgttaatttaagaaataaaaaatatacattgttgcccaggctggagtgcagtggcacgatcttggctcactgcaacctccacctcctgggttcatacgattctcctgcctcagcctcctgagtagctgggactacaggtgcctgccaccatccagcatgcccaggtaatttttatatttttagtagagacggggtttcaccatattggccaggctggtcttgaactcctgaccttgtgatctgcccacctcggcctcccaaagtgctgggattacaggtatgagccaccgcacccggctaaaaacatacattattcttaagcacacagggaaacatttacaaaaattcattgtatacaggccacagatcaagtctcaacaaattttaaaagtagatatcataaaaccatgtattctgaccaaaaagcatctacttagaatttaattatgaaagatgtttaaaatcttcatacctttggaatttttaatcccaaataatttaagattcaaagaagaaatcacaatgttgttttaacaatatccacaactgaatgttattcaaataatacatatcaaaatttgtgcaatgggatgaaaatgaaattctgagagaaatttatccctaactacgttttatagagaatgaaaatatagacactaagaagctaagtatccagcttaaaaatttatcaaagatcatcagaataaaccaaaacaagtagaaggaaggtgctgagaaaatgagagtaaaaatcaataaaacagaaaacaaagatacagtgagaaaattctacaatcccaaaagttggttccttgaaactgataataaaatagggaaagcaattaacaagatttagctagaaaaaaagaaagaagtcacaaataaccaatgtcaggaatatttctaaaaggggaagtaatctcgacaaaaacaaataatataaagacaaaagaatgccacccatatccttttgtcaaaatatatatatatatataacttaggtgaaaggaacacgtccctagaataaagctcgctgaagaatacataaaatgattaaattaggaaaattgcacatagtgacgccaccaggcccaggtagtttgataagtgacatctatcaatcattcaggaaacaagtcatttcagttttatacacactcttccagacagtagaaaaagagagactagtccccaatttctcaatcttatcttgatacccaaacagaagaaacaggaggaaaaaggaaaatgacaagtgtatttgaccatgcatatagacgcaaaagtgctgagcaaaagatgatcaaacaacctactggagtattaaaaaaatgctatgaataatatggttttctcccaggaatgcaggagtagtttcataccagaaaaatctttaattgtcattccccatggtaacagattaagtaggaaaaaatcctatcagtagatgcattcaaaaaatacaacagaagtttaggataaaaacttatttagtgatagaaaggaacttccttaacctgatgaaagttcacagaaccaagtggcaggatattgggtgcatttccttcaaaatcagcagtagcaaaagatgcccatggtcactatgtctactcaactttgaccataatctcacccagcatattgaaacaagaaaaaggaaagaagtgcttaggacaaagggaagaaataaactgttattattttgcagatgatataatcatctaatttgaaatcccaaaacattctaaataatacccaagatcaatgtgtgattttttttctttttgtagagatggagggctcactgtgttatcccctggccttgaactcctggcctcaagagatcctcctgcctcagcctcccaaagttctgggattacaggcatgagccaccaaacctggcctaatttgtgattttgttttaattgaaaaaaatttatttaaaatacttcaatttctatatactagttatttgaactaataagggagcttggcaagttggaaggaaatgaaatcaattaaaaatgagttttacttgctgcatttactgagagaattatgacaattctctaaatccagagagctgacatcccagaggagatgggtgtcactatgaagagatgcacagttatagtgaatcccctcaaggaacccagctgagaaattcaaccccatcaatataggaaagaaaaaggagaagttctgtgttgccaaatggtggggaaatgaaaggtaactggctattcttcaaaccatccatagtcacaaactgcccacagtctgaggtgttacacagacttccgttgccagatgaggttaggtttgcgtgtcctcacttcctcaaaaaaagtgattattcaggacagtgggtcatttgttgaaatctgacatctgttagaagagaaatacatctgcagagtatacatgaggacaggcatttcttgctcagtacctgaagcccaaaaggatgagttgattctttaagaaaatagcattacacttgcatcaaacccagctgctttgattcagcaagccatgacagttaaaaataggaatatcactaatttttcagatggtatctatatttctgaaaaagaagagatcagcaggcttataaataagatctaagaattctccagctaccaaagcaagaagatgctaaaggacacatgcaagaccaacttgtgattttttttaattacaaaaaaaaaccctcttatattttttaaatactttcattctgcattctgataaggaatcagaaaatgcacttttaaaaagatagcatttacaatagcaacaaaaactggtatttaggaagaaaaataacaaaagatgtgtaagacctgtgtgaagaaactctacattatctctttaaaacacttaaaaatatttaaaggaatagagagagaaagacctactgtcatggataagaaggcatgaatttctaaacaagtaaattttttccacattgagctatagattcaatgtattttttggaatttgacaacctgattcttttttgttttgttttgttttgcttttttgttttttgttttgttttgttttgagacggagtcgtgttctgtcacccaggctggagtgcactggcgcgatctccgctcactgcaagctctgcctcccaggttcacgccattctcctgcctcagcctcccgagtagctgggactacaggtgcccaccaccacgcctggctaattttttttttttttgtatttttagtaaagacggggtttcaccgtgtgagccaggatggtctcgatctcctgacctcgtgatccacccacctcggcctcccaaagtgctgggattacaggcgtgagccaccgcgcccggccttgacaacctgattctaacattaaagtgaaaaaaaaaaaggaccaagaatggtcaagatactattgaaggagattaaggaagaggttttgctgtactctatatcaggacttatttttgaatttatagacagtgatgactcagggacagtaaaattgactattggagtagaatagagaccacagaaagagaccgacaaatatatagaattttaatacatggcagaattggcatgttgctcaatggagaagggagaaggactattcagaaatgaaggagaaacatatatggatcaacactatacaccatacacaaaagtcaaccccagacagagtgagtacttaaatgtcaaaagaaaagcatactctctatgtccatcagttcaatttttttttattcttagatcccacaaatatgtgagaacatgcaatgtttgtctttctgtgcctgccttatttcacttaacataatgatctccagttccatccatgttgttgcaaatgactggatctcattcttttttatggctgaatagtactccattgtgtatatgcacaacattttctttatccattcatctattgatggacacttaggttgcttctggattgtttgcaactcaacggatcaatgcttgaggggctgggtacccaattcttcatgaagtgtttatttcacactgcatgcctctattgaaacagttcatgtaccccataaatatatacatctaatatgtacccacaaaattaaaaataaaagcataaaacttttagtagaaactatatttgaatatctttctaatcttaggatgggtgaaattttttttaatgagatccaaaaggtactcaatagaaaagagaggatttgtgaatatgattatattacaactaggaacttatgttcattgaagatcactttaagaagtgaagacaagctacgcattgggagaagatatttatatttacaacacatacaatgagaaaaatagtgtaaaaatgtataaagccctccaacaaattcattaagaaaaagtcaaacacccaataggaaaatgggatccagatgtgaccaggtgttttatagaagatgaaagcagagagagatttttcatcttcactggtaaccgaggaaatgcaaatcaataccatagtgagatagtaaaatagcctccaaaactgagaaaagcaagttggagagattacagaacaacaagatttcctaggcatagatgagagtataaatggatataattgctttggaaagccatttttcatgaccttgtaaagatgcccattcacatgcccagcgatgcggcaactcaatctttaggtgatgctaaaggaaagctcgtgtgtgttagtacggtgagacaaggataagaatgttcagaacggctcaaatggaaacaactcaagtgtgcatcaatatgagcttaggtgatagacacaatcataaaatataatattataagccgtcacacctataatcccagcactttgggaggtcaaggtgggtggatcaagaccagactggccaacatggtgaaaccccatcgctactaaaaatgcaaaaatgagccttgcgtggtggtacatgcctgtaatcccagctactcaggaagctgaggcaggagagttgcttgaacccgggaggtggaggttgcaatgagccgagatcgcaccactgcactccaacctgggcaatggagtcagaccctgtctcaaaaaatatatatattataagcaggaaaaatgaatacaactgcaactttatacaacatgaatgaatcataatacaatgttgagtctacaaagcaagtccaagaagtgtgcgtggaacatgataccctctgtagattcataaacaattaaaactaaatagtggcataagcctacatatatgtgacaacactaggaagacaagattcacaacagtggttactgggaatggatcagggagcaacacaggtggatacaagttatcaccaatgtgttaggtcttaggttggatggtgggtttgcagttatttatcatattatgaaccaaagtgaaaaagtaaaagtaaatgatgcttgttccagtcatgacagcttggtcatgaactaagcattttggacaattcgttcggggcaacactagatcaattttataaaagaggagaggagacacgctggacagaaacagcaggagagaaaactgcaggggctaaagaagccccagcccctgtccttcaagaattccacagatattggccgcacgcggtggctcacacctgtaatcccagcactttgggaggctgaggcaggcagatcacctgaggtcaggagttcgagaccaccctggccaacatggtgaaaccccgtctctactaaaaatacaaaaattagccaggtggtgcatgcctgtaatcccagctacttgggaggctgaggcaggagaattgcttgagcctgggaggcagaggttgcagtgagccgaggttgcgccagtgcactccagcctgggtgacagagcaggactccgtctccaaaaaaataaaaataaaaaagaattctacagatatgatgagtgggtggagacaggtaaaggcagtggtgatgtgtgatggggacggggatgcatgtagggctgtaaacacagaagagaaggggcagatatcaacaggaggggaaatgactagagtagcagatactgagattagagctggaaggattagatgaggtagtctggtggaaacagggaaggaaaggtggaagaaactatacttgcaagggctcaaagttgtaggacagcaggtccgtatggagacagaaggccagcgtggccaggccacggggcaggatcagaggacagaaacaggctgaagtggccacctggtgtggggcaaggaacatgggcctgattctctaagcaacaggaacaaacaacaacaacattgaaactccaggctgcctgggaagtaatagttttggggcgatgattctggcagcctgaagtttggaatgagagatggaggcagggaggaagtgaggcaggctctgtggtcagtagaggtggggagggaagatgagcaaaggacaagttagttttacttttagaaagaaggttggtggccgggcgcggtggcttacgcctgtaatcccagcactttgggaggccgaggcgggcggatcacctgaggtcaggagttcaagaactgcctgcctaacatggcaaaatcccgtctctactaaaaatacaaaaattagccgggcatggtggtgtgcgcctgtaatcccagctacttgggaggctgaggcaggagaatcgcttgaacctgggaggtggagtttgcagtgagccaagatcgcaccattgcactccagcctgggtaacaagagtgaaactccatctcaaaaacaaacaaacaaacaaacaaaacaaagaaggttgaatgggacataatgatttcctggctctgggatatgaagggggagaacaggagagaagagaactcccaggtgatgagggaggagtgggtttggtggaatgctgaagagctcagcctggactttccgagtggacatgcacatgagaagatccccaaaccactcaccgaggtgatggtacccataatggggtcttcatcatccattttctctggtctcccagctgcttgcttcctgcgggctttcactctaaggaaagaaaccagcacagtgcagctgggaccacccaggcacgggttagcgggttgtcccatcccatgctaagatggtgaaaatgacaatgaagccatccaggccccggaactaaactcggagaccttcctgacttcggagtgagggctccatcctcctggataaccagggatttggtcagggtggccatggactgaatttccatcatatagaccccctcttacacacaaaaccatggcaggaatggtcatagcagtgttatgcatcatagccaagaagcagaggcaacccaagtacccgtcaacagctgaacccacaaatcaaatgcgttccatttatataatggaatattatttgaaaacaaaaaggaatgaagtatcgatgcatgctacaacatagatgaatcttgaaaacattaggccgagtgaaagaagccagccacaaaggaccacatatcgcgtgattccattcacacaaagtacaactgcaacttcaggacagacaaatccacagagacatggaataggttagggctgggggaaagaagcaggagtgatagctaaggggtgcaaggtttctttatgtcttcgtttttcactttaggctgatgaaaatgttctaaaattgattttggtgacagatgcataactctgtcaatatacttaaagccattgactcgtacactttcagtggatgaattgtacaaaacatgtatctcaataaagctattagaaaagaaaaaaagaaagaagacctctctggatctactcagttctgctttttgttttgttttgtttttcttttaagacagggtctctcactctgaggcccaggatggagtgcattggcacaatcctggctcactgcagcctcaacctccatgatcaagtgatcctcctgcctcagactcctgagcatctggaaccacaagcacacatcaccacctctggccttagctctgtgtttctgagattcagtctctcctactccctacaaacaccaccctgtaccttccctgggaccaagacttacattaaaaagaagatgaggcacagacagatacagagcagggccatgacaccagcaccaccaagggctgcaggaaccactcctgtcccgaggttcgatctccctgcagaaaagaggggcgtgcaataactcactcccaggactcagactcttgtcctcccacctgctgggcaacttgctccagggccctgctcagacaggagatgaagaaccctgtctccccaccaccagtccagcctctctctcccaccatccatcactctgggatccatgcccctcccctcaggcccctgccctctgcaatacgccccctgaccttgcagcagcaggacagagccgctctgggacccatagatgttccaggccttgcagctgactttgaggtcggagctgagccccccgtggaggatcagggagctgttggcccagggcccagctgagctggagttgaccttgaatgagccctggctgctgttcccctccagcggcttctcctcaagccgccagcacagggagggggccggccgggctcgaaaggagcatctgcagtgcagaccctcagcctcccaggagcaggaggggcccagcaactgtgggagggctgtggggagggaggacagaactcagcagggggcctcttccttctttaataccatgcagttcctgctccagctgcccccacactcacagtaaactgagagattcagaaaaatttgcaggaagcccagcgggtgctgagcgcggcaggtgaagcctccttcttctgcagaccttactcgacgaagctccaagatcccggtattggagatgggggtggcgttcagggcaggggagccctggaaccagctcaggtgtgcaggggggttgctgggagcatcacagagcagccgcagagcctggccctccaggaccggaaggtatgaggtgttttgcaggatctctagggctttggggagagaagggtggggaaagagagatggggccagggaggctgacagtccctatccttccctccttcccaggatccagatgacatctccctctcctcccctggcctatgctggcttgattgcatcctggttcaaaggctgggcctttgcacactcaggaaactgaccaaaagtgtctgagtctcatgtctccagaggaggctcaatatctcactggtacatgcctggactgtggtggagagaggacagagagcccccggtggcgttgggaaatacagtccgctaatgtgacaggaaataagactgaggatgcaggagtggaagggtgagagaagaaccacagagctgggctgactgagatgagaggggcatggagtggtccttagtgactgtggaaagaaccagaccacaggagggatgggagatgggtggggtctaaagtctgttcactgctttgagcagagtgcatgagtgtgcacctgtgtgcgtgtgtgtgtgcgtgtgcgggtgtacgtacatgtgtgcgtgtgtgggtgtatctgcatatgtgtgtgtggtgtatgtgcatgtgtgcgtgtgtatgtgcatgtgcctgtgtggtgtatgtgtgtgtgtgcatatgtgtgtggtgtgtgtgcatgtgtgcctgtgtgcatgtgtgtgtgtatgtgcgtgtgtgtgtggtgtattgcatgtgtatgtgtgtggtgtatatgcatgtgtgtgtgtgcgtgtgtgtgtgcgtgtgtgcatgtgtgcgtgtgtatgtgcgtgtgtgcatatgtgcctgcacatggggctcacagaaggtggaagccagaaggcagtaattctcattcttgctcttcccaaatctgattgcattcaagctctgattctctacctctgctcagagacagacccagaggcaggtcccagcttcagagaggaggtctttcctacctatgccgttcctgaagatggtgatggtctgtggagcatctgggataaaaagatataaacttggcttcagcagtgaggagtgagatgggcatgggcccaggaggtacccaaagaggagccacagaaacccaccaagcggggaaggctgtcctgtctcactccccgcagatcccaaggcttagatccacacacaaggtttctcaagttattgttttgtttctctctgtcttccttacacacacacacacacacacacacacacacacacccctcactcccactgcccttgaggactcagctgtgtccccagcaccactcacaggagacattgagctggacagttctctccgtggtcacctgagctccttggcgtttcatctgacaggtgaggttggtgccatggtcctcgggcctgggggtgagggtgagctccgaggagcgggtggtctcggggtccagggggctgagggcattccccgtccaggagaatgtgagaggtggtcccgcttcacaggatcctggaaggctgcagctcagccttgtggggcggccggactccagaggctccagaaagtggatgtcgggtttctctatcagggctgaggaggagacagggagatacctgggccccaggggcttgaggacgtaaggtgtgaccccgagagtggccaggcctcaggccccgacctgccccaagtcctacacctcctccagccgcccctgcccaactcctgtccctgttctcatacgggggtctccacgtcccagggtcctctcctggggtccctgccatacctgtcacctccaagttcagcttattctgttggtagctatattttacatcccttcctctctccacgcggaagaaatagcttcccgtgtcctccattctggcatctccgatgctcagggagcagttcttcttctggacatccccaaggaggcggaatcggccctgggtctctggcttcactcttctgtctgggttgtttgtggccacaacctcagcgtagtatgggatctccccgtcccggaaccagtagacgtagagtgggggagaggaataccaggatctccaggggtaagagaaggagcagggcacaaggacgcacaggccctcctgcaccgtcaccgacttctgcacttgcagctcgtacactggcttctcctgcagggaccctggggggacacagaagctcagctgcagctccagccccccttctcacccctgtgcctgtccctcctccctcagctcactcacccccccacagcaggggcagcagcagcaggggcagcatgtctccatccgccagggccccagcccagtcccaggtccggctgtcagggaaggaaatgctccaaatgtccaaacgtggggtggggctgagaaagccccgacaggaagccggagggtgagtgagagctgtggacgcgcacagaaggggaacttgggcatcacgtgctgttggggtgaggcgggggctgggaagccattctgctcccaccccgactggacgccgcaggtgaagatactgaggcccccagacgatgtgaggcttgtccagctgaggatctggaggtgatcacccctcaaatgatgtttcagtcatgagtgagatcctcagggggctgaatgcagaaagaaaagagaaacaagggcttgtcctggtgatgaggtgagatgtcagaaccaccctccacctaaaaaccatgaaacattctggaaatacataattttaaatttgattttaaatgttcaaagtgaccaggcatggtagctcatgcctgtaatcccagcacttcgggaggctgaggtgggagggttgtttgagcccaggagtctgagaccagcctgggcaacatagcaagtcaccatctctacaaaaaataaaaactattagctggtgtggtggcacacctatagtctcagctcctccggggcactgaaataggagaattccttgagcccaggagtttgaggttgctgtgagccgtgatcgcactacggcattccagcctgggcaacagagtgaaaccctgccttaaaaaaaaaaaaaaaaaagttcaaaagggctgaaaaaaaatttttttgacccaaatttcgtggagggtcagagcatgagagagctgaagcactcttatgttaagaagattcttgggacacagcacagtccactttgggtcttgatggacctgagggtcttgtgggacggcagtgaaacacaagccctgctaaagcctcatcctattaaggagctacagaagcaaatttgccactgtgaggctgatgaagctcaatcttcaatgccctcccttgcaggatccacttttcagatgcccaggaggggcccacgcaatgtgtggaaataacctgccttgttactgctcttttatgaaagaaatttcataatagtttcccaaaatttaacaatatattaaaaatttttcacattccgattaatgtgttgtgagaataaagacagtttcttaaactatcaatgatcaaaacaaacgtcaaccacccatgccagaagaaataccgacttctctttctattctatctataaaaattgtattataaaattattctccaatattggccgggtacagtggctcacatctgtaatcccaagcactttgggaggaggaggcgggtggaccacctgagatcaggagttcgagaccagcctggccaacatggagaaacctcctctctactaaaagtacaaaaatttagccaggcatagtggcgcacacctatagtcccagctactccagaggctgaggcaggagaatcacttgaacccaggaggcagaggttgcagtgagccaagatcacggtactgcactccagcctgggtgaccaagtgagactctgtctcaaaaagaaaaaaattatcaccattatgaaggcaatcaaagaaaatcagtcaaaaatatagggaaaaagtatgcaggtgtagcagacaggtagactatactattaacaaacatagtatgccatttttctgagttgtctcatattttgacattttagattttgtgatttgatgtgttttctcagtccaaaaatcatcctatgtgtgccaaattttgtatttttgtatttttttttctaaagagtcacaaagactctcttcttaaccaaacttatgaaagctcctctgaacccttttttcaactaggctttgtccttgggactgccttgtccagctgtagcaagaatcctgctaagttggttttgcaagactcttgatatctgatcgccttcactatctgatcaaattccctagccctcacccttggtatctgatcatgctggcctgctttcagcaagaatcctgttaagtcagtttagaaagaatcccggtatcttcagtgtctcctcttagtagttttccgtccactaacacacacggccagcctccctcacctgctgcactatgcttcttgcccataaacccccctggtctttgctgtattccgagttgagcctgacctatctccattattgcactagtctttttttttttttaattgacttctgtttttttcttctgagacggggtctcactgtgttgtcccagctggagtacagtggtgcaaccttagctcactgcaacctccccctcccaggtacaagcgattctcctatctcagcttcctgagtagctgggagtacaggtgcatgccaccatgcccagcttatttttgtatttttagtaaagatgggggtttcaccatgttggccaggctggtctcgaatgcctgacctcaggtcatttccctgccttgcctcccaaagtgttgggattacaggcatgagccactgtgcctggcctgcactagtcttgatacctgtctcagtcatcctgaatagtcaatgttaacaggtgtcagaataattttttcttttttctttttcttattgcaaattctgaactttattcctcatttgaactgtgaaagtaattcatcataccggctagtaggatctaaagataaagacttgattatgtaggaaaatggtatttttatctttatattaaaatcttaatattaaattccctctcctaaaatacatagtatggcttctgttttcacatcagccttaactaattaaatctcaagagatgaataagtgagcattgggtgatttcaaatccctttatgatataattcatagccaactagaaattctctttagagaatttcccaaacaagataaagggtgtcttcagcaaacatcatatacctaatgaagtagcttcaggtcctagcataataaggcaataaaaataagcaaaaggtacagcaattacaatgaaattttaacagaggtctttatcaatgacatgactgcacatatagaaaaatccaggctaagcgtggtagctcacgcctgtaatcccagcactttgggaggctgaggcaggcggatcacgaggtcaggagatcaagaccatcctggctaacatggtgaaaccccatctctactaaaaatacaaaaaattagccgggcgtggtggtgggcgcctgtagtcccagctactcgggaggctgaggcaggagaatggtgtgaacctgggaggtggagcttgcagtgagtggagatcacaccactgcactccagcctgggcgacagagcgacactccatctcaaaaaaaaaaaaagaaaaatccaaaagtatatacggatacatttgaagccttaataaaatatttgcaagacagccagagattaatcaaattacaaaatcagttgtctttccacatcacagtaataaaaatggaattttataaaaatgccattgacaaaagcttcaaaaattatgatataatttatcaatatcaaaaaatatgatataatttttgaatatatggaatatatctaactattagagatgtatctaacaaaaatatgtatatgtcacctctatggaggaaattataaatctgtattcaaggacattaaagatgtaaataggctgggcgcagtggctcacgcctgtaatgccaacactttgggaggccgaggcgtgtggatcacctgaggtcaggagttcgagaccaccctggccaacctggtgaaaccccatctctactaaaaatacaaaaattagctgggtgtggtggcaggcacctgtagtcccagctactcagtaggccaaggcaggagaatcacttgaacctgagagatggaggttgcagtgagtcgagattgcactattgcactccagcctgggcgacagaccaagactccgtctcaagaaaataaataaataaaaaataaataaatcaagatgtaaataaactgaaaaagaggccatgttgatgagtttgagaacaatattgtatgaatgccaattttacccaacaatctacagcatcaaaggaatatgtcatacaatctcccgggtgatttttgtgcaatttggtaactctattgtaaaatttatactgaagtagaaatgttcaagtatggtcaaggcaaccatgaagaacaatgaatggctttgcaagataaaaagatgtatcataacattacagaaaatatgaccatttcagacggggcacagtggctcacatctgtaatccccgcactttaggaggccgaggcagatggatcacttaaggtcaggagtttgaaagcagcctgaccaacatggtgaaaccctgtctctactaaaaaataacaaaaattagctgggcatcgtggcatgtgcctgtaatctcagctgctcaggaggctgaggcacaagaattgcttgaacccaggaggtggaggttgcagtgagctaagattgtgccactgcattccacccagggtgacagagtgagactgtctcaaatttttaaaaatgtgagaaaataggcccatttcaatggttcacacctgtaataccagcgctatgggagaccgaggcagaaggattacttgagcccaggaattcaagaccagcctgggcaacatggtgacaccccatctgtacaaaaaacacaaaaattagctgggcatgggtggctcatgcctgtagtctcagctacttgagaggctgaggtgggaggatcacttgagcccaggaggtggaggttgcagtgagccaagattgcagcactgcactccatccaaggtgacaaagtgacacagtgagaccttgtctgaaaaaaaaaagtgacaattatgtattgaccaagtggaacaaaattgagtgcctggaaatagacctcaaccacaggaaacatcaagtgtgatagaggaagtggcaaataataaatttttctttttatttattttgggtttttatttatttaattttttttgagacagtgtctctgtcacctaggatggagtacaatggtgtgatcagggctcaccacagtctctatttctctgggctcaggcactcctctcatctcagcctcccaaatagctgggactacaggaatgcaccattatgcttggctaattttttaattttttgtagagacaggttctcactatgttgcccaggctggtctcaaacttctgggctcaagcggtcctcccacctcaacctcccaaagtgttgggattacaggcatgagccactgggcccggccaacttttcaaaaaatatctgtgggcaaaacttaatgcaatcaagtttgcagtaagtttgcaatgaaatttgactcccagctcatgcataaaagtcaagtacaggtagcttgaaggtctaaatatgacaaagaaaacaatagagctgttagaaaataatatagcaggaaatcgccatgaatttgaggtaggtaggatttctgagcaaaacataaataacactatttatttatttgtttatttttattatttattattattttttttgagacagagtcgtgctctgtcacccaggctggagtgcagtggcgtgattttggctcactgcaacctccgcctcccaggttcaagcgattctcctgcctcagcctccggagtagctgggactacaagcacaccccaccacgcccagctaattttcgaatttttagtagagacggggttttaccatgttggtcaggatggtctcgatctcctgacctcatgatccacccaccttggcctcccaaagtgctgggattacaggtgtgagccaccacgcccagccaataacactatttataaagagaaagattgaaaacttgacccctggcccagacactgagctctacctctctgaggtcttgcctccacaggacctgcacatccaaaggtcttttctccccaggaccctgacatcctactccagctcccataagccatgctaaggaggctgattctctccatgtttctctggcttccaaaggggaaaactgaagggcacctgcagagcacctgaagcccagaagtaaaggtgaccactgagacaaggagtgaggtagcagtcatgggtctcaggtccctgaaaggagaaggcagcacctttttgagagaaggtaatgggtgtttcctctccatttggctccagggtcccttcggagtgatgagtaactccatgtgtggtcccaccctcatctccacctcttgttgctcactcttggagaacttgtgcccctgtcactctcacagtgactccttaggtaaaaggtttatgttctaccacatcctcttaagatatatctcccactaactcccatctggaatcccccagtgctcagagaagagttattgtcctgggagcaactgaggaggtgacattgatcttgggaattctattttttattttcaccctctctttgtgatcgatcactagagaacagttaccacgtgcctggctgcagtgagttttaggattccaggatcccaggtgtaggagaatgtacaaaacattaggtcacttgtttccttgggtgagagacagagatacctgtagggccagccccaaaccccacctggtcctctcaagcatttgtcccactcaacactagaggcatctctcaagctggagatcccagatcttgccctgggacagcttcattcccccaacccccatcctctgtgctgtctattaagtgcaagaaacaaatggggtgagagaagaggaaattgcaaccagaagccacaagatatagacagaagggcagaaaaggaaatttccccacagcctctaccaggaaatctgggccccaagggcaaggaagaggccaggctggcccacctcaggggcacaatgcccattctaataaaagtaaagtaacacaaaatacagaattggatgtaagaaggaaaaaaagaattgaggtaaagaaattaccattttcacattcaagaagggctacagagtttgcctcaagagaaaagtgtgtatatagtttatcactactttgttttcaaattaaactggtgataatattttttattgaggtgaaattcagacgaaaaaattactagtggtaattttggatgtataaacttttgaaggatgaggtgaagaggaagctaaaatgatgctggataaaaaaaggaagatgaacgttaaggctcccccttgtggaggatagagaaagcatttttaaaagttctggattcagtggcaatgagatgaggatttgggggatgacctcttggactcaacaacgtggtactaggacacaaaatccagtgaaagactttctgtggtggggatgaatggtgaatttttgcaacacgatgtctagcatccaatttaacctacttcttatcctgaagagccattcctttctgctgctcccaaaccttgaatgaagagtgctacccaaaatatacttgtacaaagtgctgggaaaggcaggaaagaagtctttgttctcacgtttggggaagggataccagcttgcatatgtcaatcacccatcaccctcaggaactctcccacatattgtggtaagttggcagctttgggttctctgtgattattaagcatgagagatccagttactttctggggatcttaaaatctgaacaggatgcaagatttgggaattactggtttgtaccatcaaaacttaaatctgctcttaaactcttggaatatatcagcctggtgcagtacaattttaacaaattcaaagcaggagaggaggagctgagaacaaagttacaacctgtgactgagttgatggtatgataaattgaggcaggaattatgtggaggcaattatgaaggactccaactaggagaggtgtggactgagagaacaccctggtagctatgaagtctttacttttgattgggcatccattggatagatatattcagcttacatttctattatatttgattgaaagtgttgacaaaaaaaagttttattttggtaaaataatgcataacacaaattttaacattttaaccacttttaaatgtatggttcagtggcactgaatatattcatcttgttttacaactgtcacaaccatccatttccagaactttttcatctttccatactgaatctgtgtactcattaaacactgactctccatttccttctcatcccagcccttagcaagcgtcattctactttctgtatctatgcatttgactatctcagtatctcatataagtagactcttatgacatttgtgcttttctgtctggtttatttcacctagcataatgtcttcaaagtcatacacattaaagcatttgttagaacttcattccgttttaaagctgaataagattttatttgatgcatactacattttgtttctccatttatccactgatagacatttatgttgcttccatgttttggctattgtaaataatgctgctgtgaacattggggtacaaatatcagactccctgctttcaattctttggggtatctactcagaagtggaattgtggaattgctgaattacatagtaattacatgctttgtttttcgaggaattttcataccatcttccatagtgactgcaccattttacatcccaccagcaatgcacaagggtttcaatttctccaaatcttcaccaatatttgttattatctggttttgttttgttttttaatagtggtcattctaacgtgtacgaagtggtatctcataatggttttgatttgcattcctgtaattattactgtttataaaattgtataagtatttatgtgttggaaattataaattagttttcaatatttcaatattgagaagtgttaaaataatatgaacttactcaacttacctttcaaaattggaagatctagcactccccttatgacagtgattaactggggatgaacaagaactgcctcttttactttgccacactttctattctgtactttggtggttcaagctatctcttccaatgaaaattacccaaacaataaagaggggaaaaacataggatggaaaagataaattgtctcagtccatttgggctgctataacaaaataccttaggctgggtgatttataaacaacagaaatttatttctcataattctggaggtcgggaagtccaagatcaaggtgccagcggattcagtgtctggagagaattatttgcttcccagatagtatcttttcgtggtatcctcacatggcagaagaggaaaacacacttccttctgtttcttttatgagaacactaatcccattcatgaaggatggcaccattatgggttaatcactttccaaaaagccccaaccttttaataccatcaccttgaggtttaagatttcaacatataaattttgggaagacacacatttctattatagcataaataaagtatatcaagagttaaagcatatagaaaaaaagcaaatattgcactctctttgctacatgcacttagggaaattaaaagaaaaacacctgaagtttataaaagttaaattcatgaaaaagaatgaagaaattataaaagcagcaagacataaacagatattgccttaaatggaaccacaataagaaaatgatgactgaattgtcatgagaaactcacccgccctccaaagtggaatgacatctccaaaaggttaaaagaaaaatgcaaagctagaattctacattttggaaaattatccttcaaaacgaaagagaaggagtcgtgcttttattatgaaggagtaagctcctagcagagtgaactcaccacaacacaacaaaacaaacaaacaaaaaatccttacaagttataagctttgaatggggaaaaaaaactacttgggaaatgggataaaagaaaatagattctggaacgggagtcaatatttggggaaaggcaccaacaaggaataaatagctttattccaatggtaggtcagagctacagtgcagaaagtggctgctaaaattctaatacaactccttccatctttctggactgagaaacaagggatgaagcccagggcaactaggaacactgaaacaacaggtaacaattctggaaagggaagagctagggaaaaggaactccagcttctgagtataaatgctttccatttcaaatataatgaggtgaggctaggacttaaaggatgtgaaaatgcatactatgcaaatactagtcaaaagaaaactggaatggctatgttaatagcagacaaagtacacttaagagcaaagaaaatcacaggaacaaaaagtgatgttacataatgtaaaacagttgattcagccaactgcggtggctcacgcctataatcccagcactttggaggctgaggcgggtggatcacctgaagtcaggagttcaggaccagcctgacttacatggtgaaaccttgtctctactaaatacaaaaaaaactagccaggcgtgatggtgcgtgcctgtaatccaagctatttgggaggctgaggcaggagaatcacttgtacctgggaggcggaggttgcagtgagccaagatcgcgccattgcactccagcctgggcaaaaagagcgaaactctgtctcaaaaaaaaattttttttaagttgattctttaagaagacatgagaattcttaatatgtatgcacctaacgacagagtttaaaaatacatgcagcaaaaactgatgaaactgagaggagaaactgacaaatccaacattaggatcagagacttcaacattcctctctcagtaatagactgagctggtagacaaaaaagttaccagctataaaactgaacaccattggacaactatgtctaattgccatttaatattcgtcccataacagggcaatacacattctttctaagcacacatggagcattcaccaagatagaccagtgtcatcaagcaaacttaaccaatataaaagactctcacggttggtgaaagtgaaagttagttcagccattgtggaagacagtgtggcgattcctcaaagacctaaacatagaaataccattcgactcagcaatcccattcctaggcatatacccaaaggaatataaatcattctattacaaagacacatgcatgcatacattcactgcagcactattcacaatagcaatgacatggaatcaacctaactgcctatcagtggtagactggatagagaaaatgtggtacatatacaccatggaatactaagcagccataaaaaagaatgagattatgtcctttgcagggacatgagtggagctggagaccattatcctcagcaaactatcacaagaagagaaaaccaaataccacatgttctcacttgtaagtgggagctaaatgatgagaacacatggatacatagaggtgagcaacacacactggggcctttcaaagggtggaaggtgggaggagggagaggatgaggaaaataactaatgggtactaggcttaatatctgggtgatgcaataatctgtacaacaaactcccatgacactttacctatgtaacaaacctgcacttgtgccccctgaacttaaaagttaaaaaaaatcatatcaagcatgtgtatttattaaaatggaacttaaaaagaaagtagtaacaatttgtttaaaaataaaaaaccagtaaaatctgcaatcacttagaaattaaacaacacacttctaagcaatccgtgaattcaaaggaaatctcaggggaaagaaggaaatattttgaactaatataaaaatacaacataacaaaacttttgtggtgcagcaaaagtgattaaagggaaaatgcagaaccagtggatacagaaggctgactgtacgatattaaaagcaaaaaaaaccccaccaaaactgagaatgagctattgatacgtgtaacaacgtggataaactgggaaaaccacactgaagaaatgaaagcagaccctaaagcaaatatgtttggttccagttatacgatgcacagaacctgacaatacaggtattgccttcttgtatatggacagaaggagaatcacttgaacctgggaggcagaagttgcagtgagctgagattttgccattgcactccagcctgggcaacaagatagaaactctgtctcaaagaaaaaaaaaaaagacataatttttgtctacaaactctcacagaggcattaaagagtaaaatcagttatgttgtattgtttcataaaagttttacttattttgtaacaattgtattggataataatcacaatgaggtagagttttaactggaaaacaaatgctgcctctctgtgcctatatggatagggaagctgaggagaccagaaattcaagtgttaagaaggtaacttttggcagccaggcacggtggctcatacctgtaatgccagcactttgggaggccaatgcagtggattgcttgaggtcaggagttcgagacctggccaacatggtaaaaccccatctctactaacatacaaaaaaaaaaaattaactggatgtggtggcaggcacctgtaatcccagctactagggaggctgaggcaggagaattgcttgaaccccagaggtggaggttgcagtgaacggagattgtgccactgaactccagcctgtgcaacagagtgagactctgtctcaaaaaaaaaaaaaaaaaaaaaaggtaacttttgggtaatgggtaatgggggtataagaccgaaagtacattcccttcacagggctggagatggtggatggagagggaagagaagggcaggtggagaggggatggggtgcagatggggatgcaggtgtggtggggcaagactcacaagcagaggggaataagtagaaggggtatggggcaggaaggaaaagaggggtagtcagtgggatgtgagcttccagaaagaagctgacagtgatgtcctgcatgtgtcccacagggctaagtgtccacacctcagttctgtcttgagcgggaggggctcagccaggcctctcagccctgctctgctgggggcctccacacctgcagagccaacatgggcctcagatcagcaccagccacttcagttctaattccaggtggggctgagctgtcctggggcaggacagctcagccccacctggaactcaggagcttcctggagacaggcagtccggctcacctggtatagtagatccaggtgaggccataggtgaggaggaagccagcccccatgagagcccccctgatcagggtgaggacgaggggccaggagccctgctgtttctcagttacacatatgcaggaagaggagcttcctgggagaaaggagaaggtaaggtgctgttaccaggcctcagtccctcccaccaacctgaatacctcaccgggctgtctaccctcagcacctgtcctgcaactcactctgcacagaaaggatgaaggacaggtgctgggagcccagcggatgctgaacccggcaggtgaattcccctccctctctagctcctatgttaggcagctccagggtcccagacattgaggtctgggaaggattgagggcttttccctcccggaaccagctcagtgaggcaggggggttgctgtcaactgtgcaggcgaggaacagggactggccctcctggatgggcaccgacatgccattgctcaggatccgcagggctgggaaagagaagcacagccaggtgagtggagctgggaggcccaattctccctcattcctcccactgagctgcaagaagaaagacaagactgtgtggtgagtgctgagaatgggctagtcatgggtgaaaggatgaggacttggtgatcaggtcaggctaccagaaagaaggtggctgagctgagaaaagacagatgaggaggagttctcacattaaggagaagtggatgggcagctcaggtgcagacgtgccaagaactgagacaggcagacgaggaaagaggctcctagatccgcaacctgtcagggaggacccagagctcccaagacacgataatggaggtagaagcaggctcagatcttttggagcattgggtgccagattgagggccttgggctttatcctggaaagcaagagggggctataagcaagggaaacagagttagcactggatctagaaagatcctgctggagccaagtaggtcccggactggagagaagtgggataggaggcagggaggctgggaggaggctggggcaatgggccagggttgagcacgagacttgagctgggcctggaaccaaggggatgaggagggaagtgatgattggtgaagtaaaggtgttaagacttgcggactcatgaaacagctgatgagaaagggtgctgtctacagcgatgtccagaacagccctgggatcaacagggaaggaggagccgagaagcatccgagggaggtggctaaatgtgcagatctgtgcctcagagaaagggctggatataaagttgtgggaggcatcaggacagggtcaaggagagatcggattactcaggaatgtggaggggaagaactgggttctgggacagagctgtgggaggtgggaaagtcgaaggctcccaaaaaggacgatcagttagagatgaagcagggcatgcatcagaggacatcggagcaggcagaaattcaagaaaagggaacagcgtgtcctgagtactcaaactcacagagacagaaaagtagaatggtgactgctcggtggcaggagggggaagtggaaagtcgctgttcagtgggtacaaagtttcagttttgccagataaaaggagctctgcagtttggttttgcaacaatgtgaacacatttaacactgctgaactgtactctttaaaatggctaagatgacaaattttgtgctatgtgtattttctcacaatgaaaaaataaatctgaaaaagagagcagagaaaagggagaagccaaaagaaatactaggtctgttcgtgcaagatcttagtgactgggattggggggttgggagcaggaaggacccagacccaggggctgaggggtgagggagggtctcctctcccaatgctgaaccctgagctaatagaaggctcccatcacagccccagagggaagagggtctttcctacctgtgcctgtgccatttctgaagaagatgctgatggcgaggttctgtggagcatctgggatagaaagatacagcaccagcttcagaggtgacaagagggatgggcgtggtcccgggagggacccaaggaggggccacagaaacccaccaggtggggaccgctgtccttcctgcccacacacgagttttccctggttatcattctctttctctctctctcttctacacacacacacacacacacacacacacccccctcactcccactgcccttggggactcagctgtgtccccagcaccactcacaggagacattgagctggacagttctctccgtggtcacctgagctccttggcgtttcacctgacaggtgaggttggtgccatggtcctcgggcctgggggtgagggtgagctccgaggagcgggtggtctcggggtccagggggctgagggcattccccgtccaggagaatgtgagaggtggtcccgcttcacaggatcctggaaggctgcagctcagccttgtggggcggccggactccagaggctccagaaagtggatgtcgggtttctctatcagggctgaggaggagacagggagatacctgggccccaggggcttgaggacgtaaggtgtgaccccgagagtggccaggcctcaggccccgacctgccccaagtcctacacctcctccagccgcccctgcccaactcctgtccctgttctcatacgggggtctccacgtcccagggtcctctcctagggttcctgccatacctgtcacctccaagttcagcttattctgttggtagctatattttacatcccttcctctctccacgcggaagaaatagcttcccgtgtcctccattctggcatctccgatgctcagggagcagttcttcttctggacatccccaaggaggcggaatcggccctgggtctctggcttcactcttctgtctgggttgtttgtggccacaacctcagcgtagtatgggatctccccgtcccggaaccagtagacgtagagtgggggagaggaataccaggatctccaggggtaagagaaggagcagggcacaaggacgcacaggccctcctgcaccgtcaccgacttctgcacttgcagctcgtacactggcttctcctgcagggaccctggggggacacagaagctcagctgcagctccagccccccttctcacccctgtgcctgtccctcctccctcagctcactcacccccccacagcaggggcagcagcagcaggggcagcatgtctccatccgccagggccccagcccagtcccaggtccggctgtcagggaaggaaatgctccaaatgtccaaacgtggggtggggctgagaaagccccgacaggaagccggagggtgagtgagagctgtggacgcgcacagaaggggaacttgggcatcacgtgctgttggggtgaggctggggctgggaagccattctgctcccacccccactggacgccgatggtgaagatactgaggcccccagaggggcttgtccagacttgtaagtctagactcctgaggtcaccaggtcccatagctgcagcactttccttatgcacctttgtctacataggaaggagaacaccacttggccagctccctgggagtcagggcctcgggaccctcagcgagatgggagaataaatcctttatgacatgataggagctgtggtgagggaagcacacgctgggggtttcaggtggggaagactttcctctttccagagggaaggcaagttgtcagggacaaacacatcaggtggacatgaccgggtccttagcagtcaagagagatgtggtccccaccaccagttggatttgggaacctcatctcatccttgtccttgtcccaggcagcgtcagaccccatccctgatgttgacagccagatgaggcttgagagccgggcatttgaaatgtgaacgttgaggatatggaataccaagtgtgaacccagacccctcacctaccggctgttgaactttacaaaagttacctaccctctctgtgcctcagtttgctcagctgaaaaatgcagacaataatagaattgctgtgtggggattcagtgaggtctcatgtgtaaagtgcttaggacagtgtctggccccgagaattcactcattcaactgatgcttcatgggcgcctatggtgcaccaggccccctgttttaggagctggagatacagcaaaggataaactcttaggatgagaaggtaagtcaaaaatcctagtgggggctcctctgggcacactgcttatgcatacccctgctccacgaagaacagtaaaaaaagaaggccgggcgcagtggctcacgcctgtaatcccagcactttgggagaccgaggcgggtggatcacgaggtcaggagatcaagaccgtcctggctaacatggtgaaaccccgtctctactaaaaatacaaaaaattagccgggcgtggtggcgggcgcctgtagtcccagctactgggggggctgaggcaggaggacggcgtaacccgggaggtggagcttgcagtgagccgagatcgcaccactgcactccagcctgggcgacagagcgagattccatctcaaaaaaaaaaaaaagaaaagaaaagaaaaagagaaaataaaataaaaatcctagagggaagacaaacatttaatatgaaattaaaatacacagtctgctaaagaataatatattctaagaaaaaataaaaacaggaacacagaagaggaatcagtgaggactgataatttttttttttttttttttttttttgagacggagtttcgctcttgttgcccaggctggagtgcaatggtgtgatctcagctcactgcaacctctgcctcccaggttcaagcgattctcctgcctcagcctctcaagtagctgggattacaggcatgtgccaccacacctggctaattttgtatttttagtagagatggggtttctccatgttggtcaggctgggctcgaactcccgacctcaggtgatccgcccgtctcagcctcccacagtgttggtatgacaggcatgatgataaaattttttacagcatggcttggggggccacttggaggagatgacatttgagtaaagatgcgaagggcgtgtgggaatgagtccactggtatccattccaagggaaccgcacatttaaaagtcccaaggtaggaacacacgtggtgtgcttggaaaatagccatatgccagcattgaggggtgatcagtggggaagatggtaggagggtaggtctgggaggtgtcctgggtctgatcatgaagagatttgggagctctcataagaagttcacttttttcttgtccagctggaactatggaaggtgtcaaagagaggaagaagaaaaagaaggttcctgctgtgccagaaacccttaagaaaaagggaagcaatttcacagagctgaagatcaagcccctgagaaggaattttgcccaaaagatgcttcgaaagacaaggaagaagcttttctaggaaaaagcgaagcactatcacaaggaatataggcagatggacagaactgaaatttgaatgcaaggaaggcaagaaaagctagcaacttctatgcaactgcagaacccaaattggcctttgtcatcaggatctgaggggtcaatggtgggagcccaaaggtccgaaaggtgttgcagcttcttcgccattgtcaactctccaatggaagctttgtgaagctcaataaagcatcaattaacaggctgaggattcagaaccacatatcgcatgggggcacccaaacctgaagtcagtaaatgaactaacctacaagcgtggttatgacaaaatcaataagaagcaaattgctttgacagataacactttgattgcttgataaatatgtaaatatagcatcatctgctatataaggatccaattcatgggacctgtactgctggaaaatgatttgaagaaataacttctcgtagcccttcaaattatcctctccacaaggtagaatgaggaaagagacaacccattttgtagaaggtggagatgctggcaacaaggagcaccagatcaacaggcttcttagaagaatgaactaaggtgtctaccattatttatttttctaatctggtcagttaattaacagtacccactttcaaactgaaaacaaaaacctgacttttgctgagtgtattagccagggttctccagagaaacagaatcaacgggatgtgtctgtgtgtgtgtgtgtgtgtgtgtgtttattataaggaattgactcacacaattattgaagcagaaaagtcccaagatcctcagtcggcaagctggagacctgggagaactgacggtgtagctccagtccacaagcttccaggctggagatccaggaagagccaaagtttcagctctagtccaaaggcaggaggaaactcaggtcccagcttgcaggtagtcaggcaaaaggagttccccttactcacaggagcgccaggctttttgctctatccaggccttcaaccaactggtcaaggctcacccaccctggggagggcaatccactttactcaaagtctactgatttaaatgttaatctcatcccaaaacaccctcacaggaacacccagaatagtatttgagcaaataccagggcactctatggccctgtcaagtggagacctaaaattaaccatcacactgagcaaattgtgaagacaggggttgaacagagaaggggcaggattttatttgtttttacctgatcactctgcttgctttcctgagactagactctgctgagccattgcaatgcttgggaggtgagaggagggtgctcaggtctccaaggacacagtggaagtggtgagaagagggggagttaacagtatttgtcaacagattggacacacatgggaagagaaaggaaagggccacagataatgcttgtttttgacctgagatgttgcaggcttgaagctgccattgagagaagaggaaaagacttcaagagaagaatcgggagctcagcttgggacacgttgggttagatgtgcttattagacatacaagtggaaggaaaaggaaaggggttagatctgtgggtctggaatttaggaaaaataggaaaaagttctggctggagacaaaagtggggtcattcatgttcaaagagtgtctgtagtcatgagcctgagtgacatcacaaagagcatgagtttatttatttatttatttatttatttaagacatggtctagctgtcacccaggctggagtgcagtggtgcagtcatagctcactgcagcctcaacttcccaggctcaagcaatcctctcaccttgagtagctgggactacatgtgcacatcaccacgcctaactaatttttttttttaagtagagatgaaggttccactatgtgccccacgctggtcttgaactcctgggctccagtggtcctccggccttggcctcccaaagtgctgggattataggtgtgagccacaatgcctggccaaggcatgagttcaaatgaaaaagggacagagaccatctccagggcttccatgatctggatatcacacccactttcccactgaaaataactaaaaatacagggaagataattaatgcaagtcttctttaaaccatggaatggctgacaagagagaaaagaatttacagtcaaaactgtaggagatggcgggaaccaagagagggaagcagagcaccaaagtcacacgtgccctccgggaattttaaatgtggggaacttgaatttggggtttcctagacctgaggatgagagtcagactatgcaccaggtgtaggggaagtgcagggttcctggtcactctctctttctgcacacccccaggctctgtctagggaaatgaaactcaagtgcagccaaccccactctccgcccccatccaccctctgactgctgccccattcaatggcagggaggccagaagcatctctaggctggaggagacccaagtccctgccctggaatcacctcattctctaaccccatactctgattcatctactaggagcgggaacgcagaagagataagtgagcgggaaggaagttgcattcagaagatacaacacatagacataagcactctgattcaatagaagaggaagtttccccatgatgtctccagcctgggtccccagccacccttctgagagtatctgagttgatgtggaaatatgaacacaacaccacgctcttggtgtcagatctccagctccaatgctgagtccaatgtacaaatcttgtaacccttggcagacttgccctcatcttcacttcctcctctacacttttgggttttccaagtttgagggaaaggcagaggtctccaatggctctgatctcctatgcagtggtgttattatttgtttgcttgcttatttgttgactgcccacaacccagttcttcacccatagccctattttattttcctttggagaactaccactatcagccccatccctcacttcagcggggagtctgtgaattgtgcagggagcactgtccaattgacatagctcatcaccaacaatgctgcggccaattttaagaacaagcccgtgtccaattgcctctaaagatccaagttccaggatttttgccacaccttcaggaaaaatagctgttcagtttctcccggcatccctgggtggaagaaatgtaagcctgcagctgcctgagaacaaagtcaacagaggaaggaagaactctagggttaacaaacgacaaaaaaggattttagagacatcaaccaattctggaacctgctgtgcctgaagccggtgtacttcagaacttttcggctaagtgggccaatgcttggcttttatttcccaataggcccatttgagctagattgatcttgcttgcaccccaaagagttctgcctgatataacctctcccctagccactgtgttccacttcccctcagctactctgcgtcagaccctgaagctgccaaaagcctccctgtgagacttgatctcaatttcagagttcacaacccttccatgacttttgggaaagatcctgacatgtgcccctcccttataacaagaccctctgtgacagccatcaacataaagtcaattaccaggcctggtggcatgtgcctatagtcctaactgttctgaaggctaaggtgggaggattgcttgagcctaggagttcaagatcagcctgggcaatgtaatgagaccctgtctctacaaaaaatttacaaatgaggattaataaccagaatacgtaaggagctcaaacaactctaggacaaaatctaataatccaaccaaaaactgggcaaaagatctcaacagatatttctcaatagaagacatacaaatggcaaacaggtatatgaaaaggtacttggcatcattgataatcagagaaatacaaatcaaaattacaatgagatgtcatctcatcccagttaaaatggcttatatccaaaagacaggcaataacaaattctggcaagggtgtagagaaaagggaatccttgtacactgttggcgggaaggtaagttaatatagccactgtgaagaacaattttgaaattcctcaaaaaattaaaaatagagctaccatatgatctagcaatcccactgctgggcatatacccaaaaggaaggaaatcagtatacggaagagatatctgcactcccaagtttattgtagcactgttcacaaaagccaagacttgaaagcaacctaaatatccgccaacagatgaatggataaagaaaatgtggtgcttatacacaagggagtactattcagccatgaaaaagaatgagatcctgtcatttgcaataaccatggatggaactggaggtcactatgttgagtgaaataaaccaagcactgaaagacaaactttgcatggtctcacttattggaggaaactaagaattaaaacaattgaactcatggagatagagagtggaaggatgggttaccagagactggggaggatagagggcatgggggaggggagaaggtggggatggttaatgggtacaaaaaaattggaaagatgaaatgagacctcatatttgatagcaccacagggtgattatagtcaaaaataatttaattgtatattttaaaataacttaaaaagtataattggattgtttataacacaaaggataaatgcatgaggtgatggatacttcatttaccttgatgtgattgttacatgttgcatgcctgtatcaaaatatcttgtgtaacccagaaatatatacacctactatgtatccacaaaaatttaaaaacttaaaaattaaactaaaaattaaaattaaaaaatacaaaattagccaggtgtagtggtgcatgcatgtagttgcagctactcaggaggctgaggcaggaggattgcttgaggccagaggtcaaggctgcagtgagctatgatcatgccactacattccagcctggacgacagagagagatgcaaccctgtctccaaaattaattaatttattaattaataattaaaataatcaaaaccagttgtaaaaataaagaacaactaaatgagaacaaggaaaggctatgtattcagttcttgctatgacaagagagtcagccaccattatttgtgttctggcagagactcacaggcaggcagtggagtgggagagcttcatagtggggaaaagagaaaacttcaggtgtgtcctgattggaggctattggcctggggaagctgtaggtgagccagctagaagcaggtaatcctacatgattgggttaagaaaccatatccactttctctgatttggtcctaagtagaaagtggggacagaaattagggaagctgtcagttattaatcaagtcccaggccaatttagggccaatcgttacagggattattgtttagcttcctggacaggttaccagagacaagtctggtttatagagagtagcctggcttcctgagctggtgactgtggatgatgggctggcttttcacagctggttgctgcaaattaggagtcagagttctagttttatatatgatctggccatttctgcatgtatattcaggctctcacagggtaggagagcaattttccacattcaaaaagagatacaaaatttatttcagggagaagacctatatacttgtttttcaaaacaaatcgatcacctttttgggtgtctaaacagtaagcccaggactagcctggagggtgagctgaagaacaggctaaattttctctgcataatagaataatgtgaatcctaagattgtggctgagagagaaaagacagcaaatgtcctggtcttgatggcaatggaagtggtggggacatgagctggtgttctcttttgatagatgggaccccagcagcctggtgacagcagacatacagccggtaccaggttctgtggcgtggagatggatggtggagattaatgtcccatgtaggttgctctgttagggctctgcctactggacctggtgagctcagcatttttgacacgtcttttgggaccattcactactgctttccccaaactttctgtatgttttacacaatatcactggattaagaggaccgaggaatgcaagaaggaagtgtttgttcccatgtcaggaggaaagaacagcactgtgcaaatgacaattaggagaataccgttatctaccgtaatcttcccaaataatgtacagggtgggaagtttgggattcactgtacttctgtggcttgggttccatttatttcctttagactttaaaatcctggaagggtgcagcattgggggatctctggtttgcaccctgcacaatgcaaaaatccttgaggatatcagtttggtatcaccatcatgtggacatcattgaaggtagggaaggggaactgagaacaaaggcagaacctccccacccccctcccccggcccgcgtctgagaatgtgaaacaatgttgtgaagctgaagtatggacaggaaatgatgaaggactccaactagcataggtatagaccacaggaaggatgggatacatgtttgaacagtggtggcatcaaggctgaagaagacaccaggcacctgtaaagagtctctctcctgaggcaggtggatcacttgaggacaagagttcgagaccagcctgaccaacatggtgaaaccccgtctccactaaaaatacaaaattacactttgggaggccaaggcgggcggatcatgaggtcaggagatcgagaccatcctggctaacatggtgaaactccgtctctactaaaaatacaaaaaattagccaggtgtggtggcgggtgcctgtagtcccagctacgcgggaggctgaggcaggagaatggcatgaacccgggaggcagagcttacagtgagccgagaccgcgccactgcactctagcccgggtgacagagcaagactccatctcaaaaaaaaaaaaaaattagccaagcgtggtggtgcatgcctataatcccagctatttgggaggctgaggcagaagaatcgcttgaacctgggagacagaggttgcagtgagccaagatcgcaccactgcagtccagcctgggcaacaagagtgaaattccatctcaaaaaaaaaaaaagaaaagaaaagtccctctccccttgacttggcttccagtgagcaggcagggtctggctcctcttcgcattttgtttgactgggatggtttggaaatatttaactaatttacaccactaaaatattgggccgggcacagtggctcatgcctgtaatcccagcactttgggagccgaggtgggcggatcatctgaggtcagcagttcaagaccagtctggcccacatggcgaaaccccgtctctactaaaaatacaaaaatagccatgtgtggtggcacacgcctgtaaatccagctatttggtaggcagtgagcatgccactgcattccagcctgggagacagagcgacactttgtctcaaaaaaaaaaaaaaaagaaagaaagaaaagaaagaaggaaaggaaagaaagaaagaaagaaagaaagaaagaaagaaagaaagaaagaaagaaaagaaagaaggaaagaaaagaaaaagaaagaaagaaagaaaagaaagaaggaaagaaaagaaagaaagaaagaaagaaaaagaaagaaagaaaggaaagaaagaaaagaaagaaagaaaagaaaaagaaaaagaaaaaattggaagacaatctcacactgacatgaaagccccgactttcttggaaaataggaagatgtggtatcctcacatgtagcgatcagccgaggctgagcaagaaccaatcacctttactttgacgcactccccaccatgtgctatcatctccctctactaaagccaaagtccaggtgcgatttgtcggaatacttgcccagttgttttccttacacaaatccacttccctcatttgccgtaactgccttgaccatgcagaggtttgattcaggggcactggacctaccaaacaaaagatatcggatgtctctctttttggctcatcagcagaggtcaagctcccttgagaaagaaaaggaaaccaaagcccaagggctccccctgctggacccagtgagctcagcatttttggcacattacagacgttaaacttgaagagacacattcccaaagtattaatgcgcaaggccaagcctccaacggaaatgtacaacaaaaaaaaaaaaagaagaagaagaaggaaaataaaatagaataagacttcttgtctctgctcggacatgagaagaacttcgaagttgtcacttttgttcttacaacaagaaaaggctgaacaaactgagaatcaacagcttttcttagacacgtctaaagaactgcagtaacacagtgaattaccatccccaagtctggagacactggcaaatccagagagttactaatgagatccatttacacagggcagaagctgctggagtcactaactggtgaagacatttgcatggtaattctgacaagttgctgcaggctgggtaacaattagctcaagaatgataaatttctacaggtgtcagtcttaggagtccccacactttcgtggattttacctccagtaactctaccagtgaagagcccagaaaggccccctagcccatagccctggtagggagaaggaagagtaactgttgttaagtatacccagagcattctccccaacacaggcctattctccagggataaagaatttattggtaccttctcccacctggaagaagggatttctcctggccgggcatggtggctcgtgcctgtaatcctagcactttgggaggctgagttgagaggaacactggaggccaggagttcaagaccagcccggtcagcatggcaagaaaccccatctcaaaaaaaagaaggagaaggaggaacgaggaggaggagattttctcctgaatccagcacggcacattctagacttcctgtctcacctgaaatgaatggagagaagctgagaatcacttgtgaatgccataacccagaggcacaggtcccctaaaagacggatatttaatcgcagcgtgtttaataatgacttgcaaagctatacagaccctaattcctagaacctgtgaatgtgacctgtggcaagagagactttgatggtgtgattaagattctcaagatggggagatcattttgaattacctaagtggaccttcaatgtaattgcaagggtccttaaaagacaggcagcagggctgggcgcagtggctcatacctgtaatcccagcactttgagaggctgaggcgggaggatcacgaggtctagagatcgagaccatcctggccaacatggtgaaatcctgtctctactaaaaatacaaaaattagctgggcgtggtggcacgcacctgtagtcccagctactcaggaggctgaggctgaggaatcgtttgaacctgggaggcagaggttgcagtgagcctagactgtgccactgcactccagcctggcgacagagtgagactccgtctcaaaaaaaaaaaaaaaaagaaaaagaaaatcttcatcccttcccaagacaaagcacgaatattcctccccttgctcttaacgttcagccccttcaagaatgataccctatatctgtaacttcccagttctcaggagctgagaagttgatttgtaagcccagctcccacttccccaatcctgtagctgttgaatgaagcctgcactgctcaatactcactgttggtttcacatattagcttcatgacttggaacaggaaacagtcccctttctagggtgaccaggacccccagtaacaagatgggtctaggaaggaaaagcactgtgcactcccaggccccagcacctgggctcctgatttggggaagaattgacttctttaaattatcagatgttctgatcaggcacgggggctcacacctgtaatcccagcactttgggaggccaaggcgggtggatcacttgaggtcaagagttcgagaccagcctggccaacatggtgaaaccctgtttctactaaaaatacaaaaattagctaagcgtggtggcacatgcctgtagtcccagctactcgggaggctgaggcaggaggattgcttgaacctggaaggtggaggttgcagtcagccgagatcatgccactgcactccagcctggcgacggagcaaggctccgtctcaaaaaataaaaaattaaataaaaattaaaaaaaattatcaaatgttctaactcatcagcatggtgtagcttgccattattcaggatgttaattcctctcaacaatgtgctccagctttcagtgtagtggtcttggaaccattttgttagtttcacttttaagaatactgtgatttgaggtgctattttaaaagatactgtatcttaagtttaattttctgatagttgctaccagagatatagaagtgatttctgtatgttgactttggatgcagctgctccgctaaattctcatagttatatccaattagaggatattttggattttctatgtacgttatcttgtcattgaaaacaattatattttgcttcttccttcccaatcactgtgcctcttattcttcctgcttcattgaacccgctagtagttttattacaatgttgcataaagtggtaataacagatatccttgtttttcttgatcttagggaaaaagtgttcaattttcactattcagtataactggaagtccatgccacataaatacagtaacttcagtaccattcaccaataaaattctagttcatagttgtattcaatgtatacatagtgttttaatttttttattttaagaaacagtctcgctctgttgcccaggctgtagtgcagtggcacgagcacagctcattgcagctaactcctggactcaagcgatcttcctgccttagcctcccaaagagctggaattacaggtgtgagccaccacagcgcccagccatttaaaaaatatttttaattcatggatcacagtttaaaatttggagctctctcccagtaatctgaatgcctaacttctcttgaaataactgactatcttgcatgcccacgtaacagcaattagcccagggaagcaggagctgcccctctttactatgctgcattccccaccaagggctatggtctcccctgagctgaggccaaaacaagtagactgacaaagctttgtcaatatcttgccccattgtttatctttttgttgttgttgttgtcatttgagacaaggtcttgctcttgtctcccaggctggagtgtggtggcacgatcatagctcactatagtctccaactcctgggctcaagtgatccgtccgcctcagcctcttgagtagttgggaccactggtgtgtgccaccatgcctggctaatttttttattttttgtagaagtggggtctcactgtattgcccaggcaggtctcaaactcctgggctcaagtgatcctcccgcctcggtctcccaaagccctgggattacaggtagaagccaccatgtcccactcccattatttatcttaccccagtcctacttattttctatacctgcttttctcttgtagggactcgactgtgtaattcctgggaaaacagatgcactgagccattaaataaaaattcgtctagctgaaattgcttgaacctgggaggcagaggttgcagtgagccgagatcgcgccactgcactccagtctgggccacagagcgagaccctgtctcaatatatatatgtgtgtgtgtgtgtgtgtgtgtgtgtgtgtgtgtgtgtgtgtgtatatgtatatgtatatgtatatgtatatgtatatgtatatgtatatgtatatgtatatgtatatgtatatattcctctagccaggctgggtgcagtggctcaagcctgtaatcccagcgctttgggaggctgaggcagcaggatcgcttgagcctaggagttcgagaccagccttgacaatatagtgagaccccccccgcccccccacccctctcaagaaaaaaacaattcctctagccaagggtttactctctaacttcatttctcacggtggatccctctcaagcagagtccgggagccaatccacgtccaattgtgccccctgctggacaaggtccacttgttcagaggaaacttgcggagagatggagagctccagttgagatgctccagctccctctgccaacacagtttaataacaagtaataaagtagaaaaacaatatagcataaaaataattgaaaaattattttaattaatagtatgaaacaaaagagatggtagattagcagcttgctgctaataaggaaattaaattttctggtaaaattataataagcaatggtaagagaacagaataaaaataaaatgagaaaatctagcagaaataattaaggagatgatgacgatgaaaaaataaaattgaattagaggcgtgaaatataatacttggcacacagaaaacaaaagccagtggttcagagtccaagttcaggaaaatcgcacaggatgaaagggaaagaatcaaagaatgaagtaatgaaagggaaggttctccgaaggagtcagattatcaggagaattcttcatttaacttcttgctaataactagaaaactcgggataaattgatgatttttcaggaacatgtaaattacaaaaaaatattctcaaggagagacgtattaaatcaattgacaattttaatatacacagacaggatcatattaaattatttcaagctatcaacagacaattctgatataatgtaaacgaaagagaaaaataaagagcttcacaattgtttgtacagagcgagcatcacataacatgaaaacctaacaaggtaatacagaaaaggaaaagtatatagacaaatctccctatgaatattgacatggaaattccaaatatttggaatttagcgataaaaacctccagtaattttttttaaaataccagctgaatgtggaggcacagcctacagtcccagctactcggaaggctaaggtcagaggattgcttgagcccaggagttcaaggctgcagtgagctatgctggggccactgcactccagcctgggtgacacagcgagaccacatgtctttctgaggtcttggaggctaaaacgcacacacacacaaaaactcatatctctttaaaaataaataaacaaacaaataaataagccatgttaaaatggatattacctaagaataatgagatgattggatattagaaaatctattaaaataaattgtgtatagattaaaagagactatgatatcattttgttagatgtcgaaagggcatgtcataaaatatagtaacttttcccccaaaattcccttatataagattatttgcttaatctaaaattacatatttataatcttagatttacatatattatatttaatcttagatttatatatatattatatttacctacctgtctacctaatctacaaagccaaaagcagttaaatgcttctatgtaaaacattatgttgcccgccaccccaggacgtagtcctacgatcactactctttggcatcttcactcattcccaaagcaatctcatccagtccaaaggttttaaatactatcaaacattgataagtcccaaatatacatcttcattctagtcttcagtttgcagctttagatccatacatttaattgcctgtttggatatgtactctgcgtctcaaattcatcgtgtccaaaccttactctggacacccactccaagcctgctcctcctacattcttcctcatctcagtaaatgttaactccattttccagctgctcagaccaaggatcttggagtcttttttatcactcttccttctcttacaccctgcatccagtcagaaatcctctcagttctacattcaaaatatacccagaggctgggcatagtggctcacgcctgtaatcccagcattttggggagccaaagtgggcggatcacttgaggccagaagttcgagaccagcctagacaacatggtgagacatcatctcaaaaaaaattatatacatctatatctataatccaaatatatatatatatattcaaaactacttcttctcttcctcctcctgctcgttcttcttcttcctcttcttctcctcctcctcattcttcttcttttttttttgagatggagtctcactctgtcacccaagctggaatgcagtagcatgatcttggctcactgcaaactccgcctctcaggttcagcgattctcctgcttcagcctcccaagtagctgggattacaggcatgtgccaccacgcccagctaattttgtatttttagtagagacagggtttcaccatgttggccaagctagtcttgaactcctgaccttgtgatccgcctgccttgaactcccaaagtgctgggattgcaagcatgagccaccgcgcccggcctcattcttcttttctcctcctcctcctccttcttcttgtccttcttcttctcctctttcatcatttccatcctcctcttcttctttcctcacctcttcctttctttttcctcctcaccacttcttttccttttctgatcaatagaaccctgaagccaacaggtggggcagagcaagacagatagctgcgcagaggtcatctggaatggggagctccaagcagattgaggagggtatctacccagggatgtcagaggggagtgtcagaacctgcggagggagggcacttacatgtgtttgcacacagggatggccccttatgggtgtcagagcttgaacagggtgagtggagtcctttgccagagggcaccccagtagtgggaagtgggaccaagcaggatgaggagccagtcatgctggagaggagcagtggctgagatgagggactagttacactcaggagactgactgaacaaatgagtaaatatatcatgattaatgggaaacgagtttctcattctcagagaagggatttacacatatgggaaggcagaaaactacaaagacccatgtagtactggattgcaactagaggtaaaggagtgaattcatagatttcaatctgtttcatgaatgaaataacacgtgaatgcaaatgagagaccaattccaacaaagtcaggatcaagacaatggcacccaactatcacaatgattatttaacattctaacagtggggttcttggttgcaaaggaaaccaatttgggttaacttaagcaacaaaaaagaattcagtcataagaccttgggcagctgacagattcaatgaaaaggctaaagtaccaagtttagaaagtgggtcagaacccaaggaaacaatgaaagaagaactatctccaagtttccctagggacagcccagttcagtgccatcaaaatgagtactgagcccttctttatgtctttataaagtctcagtgtaagtttagtcagatacctgcatgctagccactaggtttccaggaaagtatgtatctagattttaggtccttagaggtgggaaggaggacttcctatcatgatggaaccccctaatagagaaatgtagttcagctgtgcactgcaaacaatgctccgagagtgctagcccaatgcaattacaaaacagaaccatataaatggtatcaaccctggaaaggatatatctttattatttgcaattagcatgattatatgtctgggaaattcaaaattaactgggaaaaggattacaggcaacacagtaactcattaaagtatcagttacaaaagggttttacaatttatcactattgacattctgaactggataagccttggttgtgggaggacagaagagatgttcagtgcattgtaggatgtttagcagcatccttggcctctattcactagataccagtagcactccctcccctaccaagttgtgacaaataaaaatgtcttcagaccttgccaaatgtcccctggggggaaggcaaaatcacccccatttaaattgggttgtgcaattaatttataagaatcaataactttcttacgttaaaaaactaaccaattaaaagttataatgaggccaggcaaggtgactcatgcatgtagtcccagcactttgggaggcaggaggagtgtttgagcctgggaggcagaggttgcagtaagccaagattatgccactgcactccagcaggggcgacagagcaagactctgcctcaaaaaaaaaattataatgaaaaaatcattctcgttcatatttaaagcacctcaaaatcagattaaatccatctgaaatggctttgtgtatggtatgaggtagggatctaactttacttgttgattctttacaagatcctgattagtgtatttatcttatatcttgccaaatcaaataacttgattatttttctaaatttaattttaagttccaggatacatgtgcaggacatgcaggtttgttacatagctaaacatgtgccagggtggtttgctgcacctatcaacccatcacctaggtattaagccctgcatacattagcgatttatcctgatgctctccctcgcctggcgcctccgacaggccccagtgtgtgttgttcctctgcctctgtccatatgttctcattgttcagtttccacttctaagtgagaacatgtggtgtttggttttctgttcctgtgttaatttgctgaggataatagcttccagcaccatccatgtgtctgcaaaggacacaatctcattcctttgtatggctgcatagtattccacggtgtatatttaccacattttctttatccagtctatcattgatgggaattttggttgactccatgtctttgctattgtgattagtgctgcaatgaacatacacatgcatgtatctttataatagaatgatttatattttttggtatatacccagtaatgggattgctgggtcaaatggtatttctgagaacttgattattagttctaaggtttttctgtaaattctcatgtgtttttttaggtagatgttcatgttgtctacaaaaatgacaatcttatcttttcatttctcacatttataccttatttcaactttctctctggctatctttcctaacaccacaaatgcaatgataattgtggtaatagtgggactctgcctcatttctagctttagagtttcatcattatgaccaatgagtgcctgagtatggctagtgtgaccaagtaacttaattttcagtgttgtttcactgtaattaatttaaacttaaatgggcttggcaaacctggcccatctaaaaataaataaaattgaacttctatctcatctcagactatatacaaaaatacatgccaggcttaaacatacaaaaagaaaagacatgaaagaatttgaagaaaatgtaggaaagaggccagatgtgggggcttatgtctgtaatcctagcaatttgggagcctaaggtgggaggactacctgatcccagaatttcaaaagcagcctgggcagatagggagaccctgtctctacacagaaaagaagagagagagagagaaagaaagaaagaaagagaaagagagagagggagggagggagaaagagaggaaggaaggaaggagggaaggtaggaagggagggaggaaggatggaaggaaggaaggggaagggaagggaaagaaaaagaaagagaaaggaaaggaaggaaggaagaaaaggaggaaaggagggagggaaggaaggaagggagggagggagggagacgatgtggctgtgatggtaactttcttagccaagagaagaaacccagaagctgtggagaaaaagagtggtcataaatgactatgtgaatataaaaaaattttgtatggtaaaatgtaccaaaaacaaaatcagtgcactaaggggtcagggatggtaaatttttcaatatatatggcagataaaagccaagatctatattccagcaagaactcttacaaattgaatttgttttaaaaaagacaaacattccaatagaaaacaagcaaagaatgtgattagagaattcacagaaaagcaaatccaaaaggctaaacatgaaacaactgctcaaattaaccagcggtttgaaaagtgcttatttgagtcaaaataaaatgtcatcttacacctatgaactggaaaaattataacacccttaagctggcatggatctgaggaaatgtgagcacctttaagttggcatgggggtgacgaaaagagtacccttacatgtagaagcaattttggatcatccattagcaatactcccacacattcactttatctcaaaatccacctcctaagaatctaccctattgaaacaaaagcagcactacagaaggtaaatatacaagtaggttaattgttgcattattcgtggcagcaaaactggaaataacgttaatgcccatcaatctgataatggctgagtaactttggtttgccaacaccactgagtacaggacaaatgtttaaaaatcacaacaaattgaacaaagaagcagctaggtaaaatcaatttcccttaagccagatatgaaagagatttgcaaaaaatgtaaagcaatgtcagtctttacattgattttcatttttgaaaatgtaggcatttttctttaaatatattaattgtgttaacaattaacatataacatgcattggggccggatgtggtggctcacgcctataatcccagcactttgggagactgagatgagcagatcgcttgagctcaggagttggagactggcctgggcacatggtgaaactccatctccacgaaaaatttaaaaactagccaggtgtggtggcacacacctgtagtcccagctactagggagtctgaggtaggagaatcgcttgagcccaggatgtggaggctgcaatgagccgagatctcgccactgtactccagcctaggcgacagggtgagactctgtctcaaaagaaaaggtcggggaggggtttatcattgttatttaaaataaatatataaatattttgaaaataattctcattgaatgaagattataagggaactataaatgtaactagaaaaatattagacaattcaatagaaaaattcactaatgatctgagtttataccttagtccattcaggctgctgttaagaaagtagcacaaataaacaaaataccacttcgaaacaagagaaatttatttctcactattctggaggctgggaagtccaagatcaagtcactggcagattaggtgtctggtaagggcccacttcctggtttgtagaaatgaggacttctggctgtgtcctcacatgttgaaggggaactctggggcctttttcttaaaggtcccagtcccattcatgagggctttactctcattgcttcatcacctctgaaatgcctcatctcctaatattatcacattgtgattcaatttcaacatatgagtagagagggacacacacattaatagcagcaaacttcacaaaaagaaaatccgaatgaccacgaattatataaaaggattctgaataatttattatttttaaaacatatggtgaaattagcagtattgcaccaatattcatctcccggttttgaacattatgctgtggttatataagagagtaactttagggaagttcagtgaagggtttgcaggaatttgctgtaccatttttacaacttttcaaaacactaaaattagctcggcataaacagttaaaaatgtggaggagtcaaattttaacattttacattagagtatgggaacaatgatttctcagtacttttagctgttacctttttctctgttcaccttactgcgcagttctggtactaaatagatgctcactttgccagcaaaaggtcctagtgttggctgggtgcggtggctcacacctgtgatcccagcactttgggaggctgaggcaggcagatcacgaggtcaggagtttgagaccagcctggccaatatggtgaaaccctgtctctactaaaaatacaaaaattagccaggcgtggtggcgtgtgcctgtagtcccagctacacaggaggctgaggcagaagaatcgcttgaacccaggaggcggaggttgcagtgagctgagatcatgccacactatactccagcctgggcgacagagcaagactctgactcaaaaaaaaaaaaaaggtcctagttttagtgatgttgccaagttattaaggttccttcctcactaatcgaaactaatacaaggaaaggattacttcctctttgggaaatctggtcaagctgatgatccaatttaattaaaacaataccacaaattgaatctttgtttactgcttgaaaagctactttctagatccttttgtagttcataagtgtgaggactgggttttcaggctcgtgtataagatgtgcctccctcactccttgttacaacatcggcatattactcatctgaatggaaaaaaaaaagcttctgaatagtttcagaagtagatgttaagattcatcttaaagtagtcatataggtcaagaaatgaaacatacacaatatttcagaatcccctgcatgtggcttccccagtaataatccatgcctccctccagaagtcagtaacattctaactttttgataattttgcgctcacttttctttttattgctattagttatgtagttttctttttcttttctttttttttttttgagatggagtttcacttttgttgcccaggctggagtgcaatagtgcgatcttggctcaccgcaatctccgcctcttgggttcaaatgattctcctgcctcagcctcctgagtagctgggattacaggcatgcaccaccatgaccagctaattttgtatttttagtagagaaggggtttctccatgttggtcaggctggtctccaactcctgacctcaggtgatctgcctgccttgtgcctcccaaagttctgggattacaggcatgagccactgtgcccagcataatagttttcttttagctatttttaagattacatatttacatgtatggaacaagattccatgtgttcatttgattttgcaaatttttataatatcacattgatgacaatattctatgtattcatatagctgtatttcattttttcattgctgaatagtattccattatgtggatataccacacttcatcgatccacttgccttgtaagtgggagctaaatgatgagaacacatagaggggaacaacacacactggggcctactggagggtggagggtgggaggagggagaggatcaggaaacataactaacgaatactaggtttaatacttgggtgatgaagtaatctgtataacaaaccaccaggacacaagtttgcctatgcaacaaacctgcacatataccccaaacttaaaataaaagttttaaaaaagtgtattcaagagttgagatttagcacaattaatagcttttactgtttcatcaagtgcaatcttaaatgaagctggaattttccttaacagtgagtgtgaagtgataaagaatacaactttctagcacaatttagtgctattaccttgcttccggctaaggttacagcccttttatgtaccattgcttttgcaccagcaatgtaatgtcaacacagagaaaaacgcaaataacatctgtgtattattactaaaatagttttgaccttgaagatgccccctgaaagaatcttggtatctcctagtagaaccctgtctctagaggatgcatcttagaggaacttctgtatatatgtcagtatgcctgtgtacagatgctccttaacttatggtggagtttcatcctgataaatctgtcataaattgaaaatatagtaagtcagaagtaattttctacttaatattttccatgtatgatgggattatactgaatgtgtactcagtatactgagtactgaatgtgtatggcttttgcactatcgtaaagatgaaaaattataacttgaatcatcataagtcagggatggtctgtatgtaagtgtgtgtatatatctcctacttcagtagataatgctaaaaaattttcccaaacaattgcatgaatttacactcccaaaagtgtacaatatgagagttaccattgccccacatccttgccaacccttggtactttccatttttagcaatctgatgagtatgtaatggtatccactatgacactgattggtttctacctctaaagaggtcgaggaccttttcttatacaattggagttcattggattttcttcttgtaaagtcacttttgaagtgattggccaattttgctattggattgcctgatttttttttctaattggatttgtatattcctcagttgatgagaattgttatggataaaggtagaatttcatcagactcatttccaccttccatgggatggtcatattatgtttttttcttgtatttgagcttgtgataaatacactaaatgagtttctaatgttaaaccacccttgcattcctgacataaacacatcttggctatgatgcattatcatatttatatctagctctatttaatttgcaaactctggcttaatatttgtgccactatatgcctaattaagatttgcctatacttttatttttttatattgttgagtttgggtattaattttataattagccacagaaaatgagcaagagtttgaataggaatagagtaatttcttccttaagttttggtacaatttgctggtatacttaaagtttagccatcttgacctaaagtttgcttggtgagatgatttttactactgattcttccgaatagttttagaactattcaggttttctacttgttttctgaggctattatactaaattacatatttttattaatttatccattaatctaaatgtcaaagtatgtgaaattgttcaaaatattatcgtatattctcaatgtctgcaacatcagtggttatgtcctttatttctgacattagttacatgtgccttctctcttttcattgtatttagactccccagaggtttatcaattttattactttttcaccaaacaagttagggctttgttgattctgttgtatgcattttaaaacatgtattatttagtacttattttattattttcttatgtctactttcttgagtttttttatctcttgagaagaaagatcgaattcagtttatcttatttcaattccagtaatatgattttaagctattcatatctgtcttagtccatttagtcttgctaaaaaagcaatacctgatgctgggtaatttatacagaaaagaggtgtatttggctcacagttctgcaggctgtatagaaagcatggaaccagcatctgcttctggtgaggcctcaggccgcttctactcatggcagaaggtaaaggggagccaccacgtgcaaagatcacatgaggagagagaaagcaagagatagggacagtgcaggtggcaggttctttttaacaaccgctcttgtaagaattaatagagcaagaactcacccattaccaagaggacagtaccaagccattcatgaggcacccactcccataacccaaacatctcccattaggttccatctctaatactggataaaatttcttaattttcttttttttttttttttttttattatactctaagttttagggaacatgtgcacattgtgcaggttagttacatatgtatacatgtgccatgctggtgcgctgcacccactaatgtgtcatctagcattaggtatatctcccaatgctatccctcccccctcccccgaccccaccacagtccccagagtgtgatattccccttcctgtgtccatgtgatctcattgttcaattcccacctatgagtgagaatatgcggtgtttggttttttgttcttgcgatagtttactgagaatgatggtttccaatttcatccatgtccctacaaaggatatgaactcatcattttttatggctgcacagtattccatggtgtatatgtgccacattttcttaatccagtctatcattgttggacatttgggttggttccaagtctttgctattgtgaatagtgccgcaataaacatacgtgtgcatgtgtctttatagcagcatgatttatactcatttgggtatatacccagtaatgggatggctgggtcaaatggtatttctagttctagatccctgaggaatcaccacactgacttccacaatggttgaactagtttacagtcccaccaacagtgtaaaagtgttcctatttctccgcatcctctccagcacctgttgtttcctgactttttaatgattgccattctaactggtgtgagatgatatctcatagtggttttgatttgcatttctctgatggccagtgatgatgagcatttcttcatgtgttttttggctgcataaatgtcttcttttgagaagtgtctgttcatgtccttcgcccactttttgatggggttgtttgtttttttcttgtaaatttgtttgagttcattgtagattctggatattagccctttgtcagatgagtaggttgcgaaaattttctcccatgttgtaggttgcctgttcactctgatggtagtttcttttgctgtgcagaagctctttagtttaattagatcccatttgtcaattttgtcttttgttgccattgcttttggtgttttggacatgaagtccttgcccacgcctatgtcctgagattcaatgccatccccatcaagctaccaatgactttcttcacagaattggaaaaaactactttaaagttcatatggaaccaaaaaagagcccgcattgccaagtcaatcctaagccaaaagaacaaagctggaggcatcacactacctgacttcaaactatactacaaggctacagtaaccaaaacagcatggtactggtaccaaaacagagatatagatcaatggaacagaacagagccctcagaaataatgccgcatatctacaactatctgatctttgacaaacctgagaaaaacaagcaatggggaaaggattccctatttaataaatggtgctgggaaaactggctagccatatgtagaaagctgaaactggatcccttccttacaccttatacaaaaatcaattcaagatggattaaagatttaaacgttaaacctaaaaccataaaaaccctagaagaaaacctaggcataattttcaacctttcaagagttcaataatatttttgtttcagatctccatcttaacaacaaagtgatcagaaaatatactttttgtgatataaatcccttaaactgtgttgagattttctcaatggctcagtctctgatcaagttgtacaaatattctgtgtgtgctttaataatgcatgtattgttgctgttgtgagtgtactgttttgtcttttgtttaagtcaatttgttgatgatgttgtgtagattttcttcatcttcactgacttttttcatgtttaatttactcattaatgaaagagatatgttaaaaaatttcccactatgattatgaatttggacattttctgtagttctgacaactttggatttatatattttgaggctgcattatttagtgcatactaattaggtttttaaatgttctgatgaaattattatcattgtgatatgatcatcattactggtaagtattttgcctaaacactttgcctaaataaattttactttagctgatgtcaatatatctacccaggtttattttggttagtatttgctgcattatatataaattttcatcttttttctttgacattcctgtatcactatgttttagatgtgtctcttgtaaatggcatacagttggatttcttttggcgcagtctagcaaactgattttaactgaagccttacattacacttaatgcaattactaatatatttgaatttaaatctattatttttgtacctgctttgtgttctgcgtttttttttttttgtttttttggttttttttttttttgccttttcaatgattccttttttcctctttctggcctacatttggactgctggagtaatttctattcttcttagttcatttctttcccacaagtttaaaagttttgcactctattgctaagtttattagttattctttaaaaaacatataatacacagttaataaagtctaaagttagtgaccttttaaagcttctccaatataagataggacattagaaccctttactcagtttgcacattccaatatattactattttcttattttacatgtgtcttatacttaagcctcttactcatttttattgttatgattactcaaattattactaatggtgaaataacagagagtgaaggtggagggcaaagcattgggaaattaagtggcactcagtcaccttggtgataaaggttattatgaagactgtgtggcagacaggctgcctctgaccaacttgaagaccaaacaaaaaggaaaagatagctgggcacggtggctcacgcctgcaatcacagcactttgggaggccgaggcgggtggatcacgaggtcaggagttcaagaccagcctgacctacatggtgaaaccccgtctctactaaaaatacaaaatttagccaggtgtggtggcacacacctgtaatcccagctactcaggaggctgaggcaggagaattgcttgtgaaccaggaggcggaggttgcagtgagccaagatcgcaccactgcactccagcctgggcaacagagtgagactccttctcaaaaaaaaaaaaaaaaaaaaaaaaacagataaatgagtccttgcatgcccaacttaagagatatgttagaaacatcagaaagcatctatggctaccttaaaagaatcccttatcttttttaccatgccagctaaatgcacaacccctccagttcccacacactaaacaagaaaataattttaaggccaataaaatacaactgtgggcctcattacccagaagcaggtgacttgatgtattgatgaaatgacctactgaaggcaagttatagtgccatctggcggtgaatatttggtgaggttgggtgaggtgctatcgaacagtatttgccttaaaccagcaccaatatacagtgccatttctcccagagccagaatacacaatgtgaaaaccaagcagtggaggtagtgagaggtgaagccagctgggcttctgggtcgggtgcggacttggagaacttttctgtctagctagaggattgtaaacacaccaatcaccactctgtaaaaacgcactaatcagcattctgtgtctagctaaaggtttgtaaatgcaccaatcagcactctctaaaaacgcaccaatcagcattctgtgtctagctaaaggtttgtaaatgcaccagtcagcactctgtaaaaaacacaccaatcagcgctctgtgtctagctaaaggtttgtaaatgtgccaatcagcactctgtaaaaatgcaccaatcagcactctgtaaaatggaccaatcagtgctctgtaaaatggaccaatcagcaggatgagggtggagccaaagaagggaataaaagctggccacccgtggcaacccggcaaccagctcaggtaccattccaggctgtggtgggtttgttcttttgcctttcacagtaaatcttgctgctgctttctctttggtctgtactacctttatgagctgtaacactctgtgaaggtctgtggcttcattccttaagtcggtgagaccacgaacccaccgggaggaacaaaacaactccagacttgccacttttaagagttgtaacactcactgcgaaggtctgtggcttcactcctgaagtcaagtgagaccacaaacccaccggaagcgagaaactctggacacatctgaacatctgaaggaagaaactctagacacgccatttttaagaactgtaacactcactgcaagagtttgcggcttcattcttgaagtcagcaagcccaagaacccaccggaaggaaccaattctggacacagtagaactggttcctcttccttattccacctaatcacacacctatgcaattttttgcttcctaaatttgcaactttggagtgggtggctttgcgagtcctagtgtttcaaggagaaacacttccactaaaggacccagttatggtttcaagtggaaggagaggctgcctcttggccattttgggcaagtcatgatgctaaaccatcaggcagagaaggaggtacctttactaagctagtaaaggtaccaattgatccaattattaggagaaaaatatgttgttgctatacagtgcaatcaaggagaattaggagtggaaccgagactattccgtcgggaggctttttatactctgtccagaataatggtcaatggataactgcagcagtgcaataaagacgaagcattaatgacttggatcctttgggtcactctaccagataaaaaattccaaggaaacgaagtgctagaggaaggtaagagagacacaaaatggttatcaatttaggctttatgaccagctatagaagcaggaactgcagctattatgttttatggtaactaattgtttctttcccacttcaatttcactctgatatcttacatgaagagcacttttcatggctgttgttacaatttcagtttcagaagtatagcaggaatgacttccctctgcagtaatagtagaactaatactgggcatctctgtgttaaggatgtgagcttgttcatccaaacaaaagaacgtaatgggtgctcagtgacaacagggatgacctgtgcctcttcagatccatcattcacttgtctctgctcatttctgtgcactgacaggctgacctctcaggaccgcatcatcagcttccccttgccagtgggaggcactgtccggagattgaagggtgggaggaaagaagtcagggtttttattcctcctgttctctccctacagttctggccgtggctgcattcctctgtgctacaagtcctataaggcagcccatcctccaaggctactgcccttgccccatcaggtctaggctggtacccgtttcccactgctgcttgtccttggatgctgcaccatctctttttggacctcttaatcctgcctacatctctatttagtcccttcattggcctatgtttattatttatttattcatttatttatttattttgagacggagtcttgctctgtcacccaggctggagtgcagtgacgcgatctcgactcactgcaacctccatctcccgggttcaagcaattctcctgcctcagcctcctgagtagctgggactacaggcgtaagccaccgctcctggccactttttgtatttttagtagagacagagtttcaccatgttggccaggctggtctggaactcctgatctcaagtgatccgcctgccttggcctcccaaagtgctaggattacagacgtgagccaccgtgtccggccaagtctatgtttaattaagctcttgaatgagccatcagcttcctattcgaatcctgatggatacatccatatatttaccacctgtttcctcctcgtacctcagaccttctacctgggatcattttcattctatgatcaaagtacatccatgaaggagggtttcagtttgcttttaccatatgccatagtaccagtttggtgccacttttacttttgttcctttcctctcaggagactgttgaaaactacagctcatttttataatcagaataagcctatgctcatcagtcaaaagcaggtttgaatgctctgcttagttcttggagttctcactttctaaattttagctaggaaattcctcactagattgtctttccattattttataaagattgttttgagtattttatccgccacttttaatgactttcagcagaggagttgatccatatagcctggactgccattctcaaaaatgagaaagttctcccctctcttaggtttttttgttttcccataagatttttgcatttgcttgctatttcacgtaggctgttgggaagaatgtctcctgaaatcttggatgagaaatatgacaatagagaaagacaattcactttcaagatatcaaaatactattcatataacagaaaaacaaaaaagtattaatattagccatctattgttacctagggaattattccaaaactgagcatcttgatacacacttatcttacagtttctgtggtcaggaatctgagcacagcttagcttggtccttggcttacggtttctcactaggttgaaatcaagatgttgactcagggtcttcatcctcatctgaaggctctactggggaatgacccacttccaagtttattcattggcttttggcaacatgcagttcctcacagggtattggaatgagagcctcagttcctttctagctgttggcaggggcttccctcagttccttacctcatgagtctttcaaaaatggcagctcagaatatagccacttacttgattaatacatgaaaatcagaaaggcagtagagtttgctagcaagacagaagtcacacagttttttgtaatctaatattggaaatgacattccatcacttttgccatataccattagttataagtaagtcactaagttcatcctttggggaggaggttacacaaacacatgaatatcaggaagtggagatcattgggagatattttagaaggctgacaaccccgcaaaaataatttctgaatttccatctgtatctcagcattcaatagctatgcacctgtttcagcacattggcaggagcaaaacaatagcaaagtgtttacagcatgtatcgtgtgaaatacatccactctcaaagcaccttcgtttggctatttcttcagtaggttcatcaaataaaccactttttttcaagcaactctcagttatcagtacgtcctgctgggtgggtattgtcatctgcagagtacagtatcggctttttgtttaagtattgctttgaacatggaagagctgctttgtcatcctgtttaaaaacctcataggcatgcaattccaaggtctcttgtatgtcatgagtttgattttgactgaagaatgatgaaagtgtggcccaaccatctttctgcttatggacattaattctattacctgatactgagctctgattattcctggacacacaattaaaggtgtgaagaaataataatatacttctaatttctaattcactcatagcctttgccatttttgttccattatcaacaattgacttttttcatatgacatacattccataaagtatatgcactatgttgttaactacgtgtaagaccaagaaatatctccaccaccaagtagaaatatagtgaaattcatcataaatcaggaagaaaacacctgattgtttctctatgtccaaatgttcaatctataagatacagaattagtacataaaataattttgtgcacagcttaatgtaatttggaataacttttcaaaacatgttttctagaaagaacttttaagaatcataattttagcaaattttgaaaatcctttgtcttctacttcaaaaaatggttgacagtgttgtgcaatcaattttacagctttaagattttagcttcactaactcaaaactataaagaatttttttaaagtgtgcttataaaatctgttgttttgaagtttgattagtgagaacaaaatgtatttggggaatctgatttccaacacttttctgttttttttttttcatgctctttgcacccattatgatgtctggatcaaagacgatttagcacagaagttgttacacatgattttagagagtttcatttctacttcaagaaatttaagtaagcaaaattgccaatctttttgaaattcatcctcacaaatgtgaacaattttcagataacactttttctaaaaagatacacagcctaaatgtaaataactaaaaaacatcaaatacggtcatcaaagattattttcgttaataatatgaatgatagaataccaaaaaattctacaagggaggctgcctatcacaaaaatgatctctggatttccatggaatctaatctttgctgttctgactcatgttattattgatatttttacaatcactttccagttccaagaggagacaatattctttctaatggcatttaactaaagcactcttaatcttcataccaacactcagtctatttcctgagttgtataattatgcggaagttctcagtaattgtttttggacctgaaaggcatggtgtaatgatagagtgcccccaggactgaagcactggttcatcccagctgctgtgagtgttgattgctgacagctggcagcactcccttgtaaggattgccttcagagcaaggagctgcctcacccaaagtcacaaccccttcctgggtcagctcacatccaatgactgctctattaaatcagcattgtttatgctggaggccatgagcctgtttatgctggaggccatgagcctgaggttttctccatactttgagttcctacctaataaatagcaacctaagtcagtaggtaaacaaaccgaaatgtaacttagtagtatactttttgtaacaaatagcaaggttccagccaatcacaaacagccaagcttcaaccaatcacaggcagctaactgatcatatccgtgcccaaataaggcaaatgtcttgctgtagccaaccagatgatttctctactttgcttctgtgttcagcttatacaagctcactgctcttctgattctgagtgttgccctactcatgaattgttctctactcaaataaactgtgttcaatttaatttgtctgaagttcttcttttaataggtcagtgaatggtataaaggcccagtcccctttccccgattcaggacatctctgtggagccatctagctgtagagtttcctgtaggattggctggggcttctgttatgactgcatagtagttcaccttctcccactgcctaatcctacttccttcgctcccctacgagtgtgaatcctgagagcaggaaattaataggggtgttctcaggattcacacttgtaggggagttctaacctctgcttcagagtcagtttcctgaagaatcatctgtaacttataggttttcacaatcaccattatttatttcagcctcttactcctgtaattgtataattacacacacatttatactttgataaaaatttaactttgaacacacacacgatgttcactccaagctacattagaatgcttaaatttgaaggtgactattaagattttaaagttaggaacatgatttgttcatatttctaatgttattgtgctagttagataggctggtaacccaatctgtcatgtattcatcgtgaccacacaagttcagggatgccagaaatgaacttcaaattggcactcagtggttccacctccaaaagactgaggtgagatcaaagtcaaatagaaaaaaatgaacaaatattgaggctgaagctgaattttaatgcaacccaactatgtgcatgtttgtgtgtgtatgtatgtttacttaaacatgaagtaaagaatgacaagacacacagataaacatggatactatattggttttctagggctgttgtaataaagtattataaactgagcagcttaaaacaacagaaattatccgggcacagtgtatcatgcctgtaatcccagtactttgggagactgagggcgggcagatcacttgaggtcaggcgtttgagaccagcctagccaacatggtaagatcctgtctctactaaaaatacgaaaattagccaggcatggtggcaggtgactgtagtcccagctacttgggaggctgaggcaggagactcacttgagcccaggaggtggagactgcagtgagccaagatcatgccactgcactccagcctgggtggcagagggagactccacctcaaaacaaacaagcaaaaacagaaatgtattctctcgcagatgtggaggctagaagttagaaatgaaggtatcagcaggaccagcttcctctgtaggccccttggtttcttgttctagcttctggtggttgccagtcatccttggtgtttcttggcttgtagatgcatcacttgaatctctctgcctccatcatcacatggccttcttcccaagtattttatctgcatcttcaaatatctctctccttatcagattaccagtcattggatttagggcccactctaatccagtatgccttcattttaacttgattacatctgtaaaggctctcaaagaaggtcacattcacaggtacaggggattcaaactttaacatatatatttggtggggtggggacacaatttaactcacaacaggtatgacagataactttgggaggagaagcacctggtgaatgggtaggaagggaggggtcaatcaaggtaaccaaagaaaaaaataaatgaggatgggaaagaatacagtaaaaataccttcataagaataaattgccctgttaatataaaattctgtgcatgtgtatgaataaattagaataaagagctagctctgtattaatttgtaggcataacattcgataattcttttatatggtttattgtgtgccaggcactgttttaagcactttccatacattaactcctttaatccttatgtctcaacccatgatataggtactattattattacacccattttactgatgatgaaactgagacatagagagacatagctagtaaaatggctgagccaggattcaaacctgagccatcgggcttcagaatctgtgctcttaatcaccttggcatatgtagtatgactctgttcttcagaaactaaaacaatatatatgtgtacaaatgcatatgtatacatttatattttagaagacataaaattaaagtatcaagatcaaaaataaaatcttggattctaaccagctctgtcagggctcacagacaatgaatgataaatattctggttggcctattttgtgtcatatacccagatgcccagactaggtttttttggggggagaaggaggggcatcagtgcttggacattcttgtcagagtcatgtggagtgggttacttaaaggaaagagatgatctattatcagaggtaggaggagatggcagctgacggacttgcaaaaactataactagtctgtctccttgaacctcagtgtaaccttccctacctttttcttagatgtaaacagcagagcagctgaaggtccttcactcatcaaacaaaaagaaggtatggcccaaggtgaagagaaaggctatagggaaaccctccccaaaacatcacacccattttcccatgccctttgttcagaaaataattaattgtggaaatgagatctgttgcctccccacttcccccagcccagacccgacaacaatggggaccctgtctctacttcctacaagtccaccaggggcaaattaccatttggggttatttaatggtgtaataggagaatctgctgcttttagttcaggggtgtccaatctttcagcttccctgggccaaactggaagaattgtcttgggctgcacataaaatacattaacactaatgatagctgatgagcttaaaaaaatttgcaaaaaaaacccaaaacctcaatgttttaagaaagtttatgaatgtgtgttgggccacattcaaagccatcctgggccacatgaggcccatgggctgtgggttggacaagcttgatttagatcatctcgtgattttaggctctgccagtgtggggattatcccacctgcagggattatgtggtgctctaggattatcttgggtttggggttgatccccccacatggaaggattgtctggtggtgctatcggattatcttggttttagggttgatccctcacatggaaggattctctgctactttgatgttcctcatgacccggtgccgcctgttctatagtatcaacgtgtaagtccttgactcagacctaattcaaggtaggttaaggtgtcctcctgtctaccagttcctgtttcaggaacttgggatgaccttgtgaagggtaggaagtttctattttcctttgaagtgctgttccaagaggtaataatagtggaacttgagtttcagcagttgatgagaatggtggcccctgtgtctaagaagtatgagaattacaatattgggtagcagagactgataaagatggtgatataggttgagcatcccttatccaaaatacttgagacagaaagtgtttcaggtttgatttttttattttgtattttggactattttcatatatataaaatcagatatttggggatgagacccaagtccaaacacaaaattcatttgttttcatttcatttatatatgccttctacacatagcctgaagataattttatacaatatttttgtgcatgaaacaaggttttttgtttgttttaagacagggtctcactctatcaaccaggctggagtgcagcctcaacttcctgggcttaagcaatcctcccacctcagcctccctagtagctgggagaagaagcatgcatcaccatgccctgctaagttttaaatttttttattgtagagatgggaatcccactatgttgcccaggctggtctcaaattcctgggctcaagtgatcctcctgccttagcctcccaaacagctggattacaggcataagccactgtgcccagccccatgaaacaaagttttgactgcaatctatcacatgagatcaagtgatggaatgaaatttttcacttctgacgttacgtcggtgctcaaaaagtttttgattttggagcatttcagattcgagatttttgcattaaggatgctcaacctgtacttgtgtgccaatgtctgatgggaatggtggccccctgtttcagggagtgaaggcaatgatggatcctgagttctggatatttgtaggaattgcagtagatgagtcttatgtgctgagagatttggagccctgtatttcagagaatgaaggaaccagtggtccctgtgacttgctaactgatgagaacagaacagaggccttatgtttcagaaactaatgggaattatggtcactgttcctggggggcttaagcaagtcccagcctaatccacaagtcatttattattcactcatctcctcattcattcacttagcaaacattttcctgagcccctgctctgagccatgcctgggtggagtgatattgaggacacagaaatgactcagacccagactgtgccctcagtaaattcccaaagacagacccagacgtagaaaatcacaacacaacaggatcagggccaggacaaggactgtgatgtggtgcctgtcctgatctgtctacagggcatccagggtgaatgtagaatgacagtaactctagatcgtaagtgaaagtgaggggtctgacaaagggtccttcttaatcatacatgaatttgtgtgcatgacaagtttaaatgtacccagtgtcaatccttagaaatagcatattttcccagagcaagcccaccccaaagaaggagccagagaggcctgggtttgaatctctagctccatcacatactttgtgagcttgggcaactcgctattcagaactgcatcctattcagtattccatccttacaattgggataataatagtttctaataataaggtttctgtgtaatcaatgatataatgtataacaaatactcatcccaggaactggctccaagtagtcattcaataaagggtatctgttgtcattattattatcccattgttagtaattatcaacaaattttaaaggatctagaagtaagcatttatcgaatatctgggtttagaggcttaaaagcattggacaaaatcactttaaaaatcagcaaatttgggccaggtgtggtggctcagccaaggtgggaggatcacttgaggtcagaagttcaagaccagtccagcaaacgtggcaaaaccccatctctacagaatacacaaaaattagccgggcctggtggcgcaggcctgtagttccaaccacgtgggaggctgaggtgggagaatggcttgaacctggaaggcagaggttgcagtgatctgagataatgccactgcactccagcctgggcaatccgtctcaaaaataaatacatacatacatacatacatacatacatacatacatacatacataagcaaatctgtaaatatcaatatgcataaccattagtttcttgacataaaaaacctcccaatctcccaattaactgaatacactaggaataaatagatgaatacaatggaatattatatcactattaaaatgaatgaggaggttctataagcctagatatgggaggatctttggatatcatgtaaaaaaaaaaaaaaaaaccaaggtgcagaataatgtgatcctatcaggggacagaaaagaggagggtggtatatatgtgcatagatgtataaaattcctctggaaagatacataagaaattagtgaatatatgctgtccccagagaggagaactgggtggctggaggatagggagggagggagatgcactgttgaaagcccagcaccatgcatcctgaacgttttccctggctcttaatgtccactaagttctcagatgcccacagcatctctctcctctaccctcttcttcctcctagttccccattgaaagcaactcctgccccatccgttcctgggccagactcagggagttgtagttttcctacctgtttcccgcccacaggttcctgttctctgcccccagtgcccagcagtctccagccatctccagctcctcacattcctgccccaccccttcctctctccccaggtcctagcccgcaaactgcagggagggggcctcctccccagcctccacccgtctctccccctccactccacacagcctcagcggggtctgacattcagctataaccgtgtccccgccccttgctcacaaccttccagggctccctgtcaccctcagaaggctaagttcccagcctggcctgaaactccctaagaatctgaccccgcccgctcgccccaccagcctcatctcctgtgctccttggctcctggcttcggaggctctagtcagacttaagggctttgttgtcctcccagcacctccttggtttcctgccttgggccttcgcttcagctgtgccctctgcctggaagggccttagtggaggtcatgccacaaccacgccttctctggaggtcctctctgccgtctccagctgccaggattcctcccgccctgggctctcacagcctctggcctctccctgtgtcatacccagatcacccgggattgggactgtctgcggctggctctgtctcttccatcagactgtgagctccatctgcaagggcagattcgggtctgattcacctttgagcccccagtgggtgggggtggggggtggagatactaaagctggtgggggcgaagctgggagagcaggaagggggagagagagacgggcagaccctgactggttcggggagagaggggaggagaaagcgagagagaggaagaacagagacacagagacaggaagggagggagagaaacagagaaaagggaagaataaatgggagacacagataatgccccacaggcagagaaagaggatggagatagggagagggcgaaaggaaggacagatgtgcagagacagaagggaggacagacggaaagagacacagagaggcagcaaaagcaaccaagaatgacaggagcagagaggaggagggaaagagggagagagagagagagagaacgagagagaagggagggagggagagagggagagagagagcgagagagcacgcacagagcgaggaggaggcgcaggagagaagagggagggaggccagcgagggacaggacggggcggagaggcggaggggagctagggaaagccggggaggagcgagactggccgaggaggagggcgggcgagcgggagcgccggccccgccgcctcccggcctcttttgtcccttccctcctctgcgtcaggcttctctggcccggcctccccctcccgctccctcctcctccccggggctggatggaattttttcccctggacctgggccagctccggggcaggggggaagccaggccggactgggctgggcggtggggaggggccggggcggggggccccctggggagggggctggtccgacggccgcgcagccggcggggtccagggagggggagccccggaccgcagagccggggaggaggtgacggccggagggagtcggggagaagggaaggaggatggcggggacggcgggaggaaggggagaggccgccgtgcggcgaaggcggggagaggatggagagcgctcggcggcggtggggcccggcctgcgggcccggggcggcggagaagaccccttccctgcgacgcgggagccgcgggagccgtgagtctgcggaaagggagggtggggggctggggcccgcactcctgggtccctgagggaggagcacccgggggcctggatttcagggttcttggaggaggagttgggggtggggagggtggggtggctgggagcccagactcctgaatccttgaaggagggggctgggacctggatcccggggtccagaatctggagaaggctggggacacttcctggattcaagagggaggacagagatgggggctggggctggtaggatcgtggctggaagagactaggggcgagctgcccgagccctcgggggaggtggaggaagactggctttggagtgcctgcggcagcggaagggttaacgtctggctggaggggagggggaggcgcagggatggggctgcggggctttgaggggtcaagggtgagccgtgccagtgggagggggccgaggaggagggggaggttgtctgggctgccagacaggccagggtcagcggcgggggcaggagatgtctggaggaggagaggcccagcatccatgctccctcggggacccgggattccaggtcccagacccctcctccctcagatctgggagtacaccacccagtcccccacccattccagaatccgagcccccagcccccttttttccaggatccaggagtctgagcccccagtctgttctctcagaccagggaatccacactccagcccctaactccttcaaaaccccagagttcagaacctcagcccctcttcccaaggagcgcggcccccaaccctctgttcctctagaacccaagcgttcaggctccggcatctttctccctttgaagcctgcagttctggggatccccaggcccctcctcctccggaacccaggagtccccacctcctctttagccccagctggagtccagccctccaggggttaagggggcgggaccagctagttgccatggtgccagactgtttgggtctgctctctgacccttgggggctccccagggtccgcagagagggggagggggacctaggcctgggggaagtccagagcctaccccttccccaaagcggggctatgggcccagggagttcgcgtttccaccaacgccttgtccagtgaccttgaacaagtcctgacccttctctctccgcctcagtttccccaaggagacactggttggcgggtgggggagatgcttaggtccggggaatctctgagattctcggcttcccctctcccctcaccctcctcctcaggccccaggcagccccggggcatgctgggaacccaggcctgggctccgggccaggttggtgtgggggggtgggggcgggggcagcctcctcccttccccttcctccccaccttggcctgactctcgcccccgcctgagggtctgggaggttgggaaggagggaagggggaagagagctggccgtagacccgtctccggcccccgcctccccctttcctcctccgcccctttcccgcctctcctccccctcctcaggtcgctaccccagccctgggccccttctcaaaccacccccaccccacccccagctccagacctggctcgagctgcgagggggagggagagagggaaggagaaaagagagagagagaagggagggagacccaaagagagaagggggaggggaggaaagagagagacctaagagggagggaaggagagagagagggagagagacagagactgagagagagcaggagacggaggtgagggatggagagagggaaggggcggagggagaggaagtgaggaaagacatccgaaaaaagggggtggagaagggtgagaaagaggagagagactgagagagggccagagagagaatgagagagacaaagagggggaagggggagaaggggaggatgaaagacagaaggtagaggaaaagcaggagaaagagggggagagaaggaagaaaacagaagcggggagaggagagaggcgatgggcagagagagaagccagcgcagagccagggagggatgtcctgatgcaggaggaggctgggaaccagggaaggtggaaagaaagagggagagagaaaaaggcagggccagagagacctggactgcgagaaaggaaccggaaggtgcgcctggagcaggggcagcgagaaccagacagtccaggaggaggggctgggcacgggagagaccccagctggaggggctcagagcccaggggtggggagggtgggtgctgggtcccggggtccagaagctggagaaggctggggacacctcctggattcaagagggaggacagagatggggctgggcagactttgggagcctcttcccctctctgaggctcagccccctcacctgccaaatggggatgctgagggcacctcgctctctggagtgggaggtgtcagggagaggactggtgctcagggcctggtatggggtcagcgctgggagattgtggctgtcatagttgtaaatgacccaaagaagggaggagagaggaaagaaagcacctagggaggctctgatggttggctagcccctggcctccttagccctgggcctggagtctctgcagactgacaggagggtaggtaggaagcaggtgtgcccaaagggccaaattacgagacaaatgaggttccctcccagccggcacccaggaagccaggttttctatcaggccatgccttccccaggaggcctgcctggccggagggaggaggggctgggggcagggactcctgggtctctggggagaaggaggctttggatctggactcatgagtctgagggaggaaggggctgagtccttggattccaggaacatttggggagaaaagggccagaggcctggattcctgggtctgtggtgaggaagggcctagacttctgggttctttagggaggagggggatgagagccttgactccagggtccctgatgaggaaggggctgagggcctggactcctgggttccttggggaggaggggccgggggcccggactcctgggtcctggcacccacccgtagaaccgaccttgcggggccttcgccgcacacaagctcgtgtctgtgggtccgtgtcgggggctcaccatcgcggctggggcctccccggccctccccctcatccctggtcctcctggtccctgtctgtctgtctgtcgggtctgtccacctgccgcgccccccgggctgaggtaggaggttgtatagttgaggaggacacccaaggagatcactatacggcctcctagctttccccaggctgcgccctgcacgggacggggcccggcggggacccccagccccactcagggacccttagccccactgggctgccccagggaccctgggaggaagagccgggctcttttctgtccttgtccctgcatcccctccttcccctgaaatctgttttccttccctgtctgtctccatctctgctgtgtctctgtggcttctgtgtctctttcacagtggatcctctgactccctcttattctggctttctaggtctctgcccctcccgatatctctctgtgtctctatttctgtcgtttttggtctttctgtctctggctctcagaatgtctctgtgcctatctccatctctgacccccaccccagggtctaccgggccaccgcacaccatgttgccagtctctaggtccctgagaccctttaacctgtgaggacatccagggtcacaggtgaggttcttgggagcctggcgtctggcccaaccacacacctggggaattgctggcctgacttctgacccctgactcctcatacccttcctccagagcatgacatttgaccaccaactgaaacctgacctctgaccccagaccactggcccttcccccgccctgtggtgacttcataaaggttactagcttctcccctggccttgagacccacacgatggccctgctggctctggccagtgccgtcccgtctgccctgctggccctggctgtcttcagggtgcccgcctgggcctgtctcctctgcttcacaacctactctgagcgcctccgcatctgccagatgtttgttgggatgcggagccccaagcttgaagagtgtgaggaggccttcacggccgccttccagggcctctctgacaccgaaatcagtgaggagaccatccacacttcatcagtgtcctggggaaggtgcagagggagggcaggagaggcccagagggtcaggctgagggacagacagagagaaacagtcagaggagaaaggctcaaagaccatgagaacaacagagacttagggacagagagacacagacaggggaagacagcagggcaaagactcagagaggggaggatggagagtcagagaggggaagatggagactcagagagggggaggatggagactcagagagagaggaagatggagactcggaaagatggagactcaggagtatggagagtcagagaggggaggatggacactcgggaggatggagagtcaggaggatggagactcatagaaaggggaggatggagagtcaggagaggttggagactggagagggaatagagacccagagaggggaggatggagactcagagggtggaagatggagactcaaagaggatggaaacccagagagaggaggacagagatgaggcagagactaggggaagcaggatagcgactggtcgggggcagagactcagggaggatagagacttgggagggactcaggaagcatagcgactgtggggcaaagagtcagagaggggaggatacagacttgggagggcagagactcagaaacagaatgttcgcattagggacatggtgttgcggggagctgcctcccccagcccctgctccctccctcaccgccagactatgatgagagaagccacctgcatgacaccttcacccagatgacccatgccctgcaggagctggctgctgcccagggtgagtgtgtggggatggggagatgggagatgtggacttggagcccctaagaaatgggtatgtgggagggcccagggcagaggaaggaggcccccagagttgggcagtgatccgggaggggaaagctgggaagacattgagctcagctacttgtccaaacgaaggctgaaggcagctctaagagccaggggctgaaggtggtgagggggaagggacgctgcagaaattgcctagagctggaagtccagatggggtcgggtaggcataggttctgccatggctgcatggctcacactcttactggctatgaagttctgggtgtgtcactgcccctctcctggcctcaacttacccatctgtaaagtgggacaatcttcttgcctcctaggatggccatggagctcagtgcaggggttggggctgcctgatgagcctgatcttagggaaggcatcttcctctaggatagaacacacacacactcgcacacagacacgctcagagacatacactcacactcacacacacacacagatttcttataaagtgattccacatttttgaggtgtgaggcaattagagggcgggaaaacaggaacagcagagtggatcactcaggtgacagcagtgaaaagagacaaggtgtgactgtcctggtgagacaggcacatgtgacagccttgaggtgtgtggctgtgcgaagagacctcagggctgggggccacgcaatgccgatgggcagcatgggcggtaatcatgcctgatcaccatggccatgatccccacgaggtgccagaccctggaactgtggaggctcggagttgcaggagttacagagccctgcgctatagaataaactggcttcctcttaggtccaggagctcagggcttattcccacacccacagtcgctccttttgcttcctgctttgccctccaagcgtcctgtcaacaatcccggaagagggaaggttcccatccacccagggggcatccagggccagcctggagaaggcctcagctgtggctctccccatctccaccctaaagggagacctgaggccctaaacctctccatgtgggggtgtgcaggattccaagaaatgccctttctccccacataggctgccttgttacagaagcttttgaaaagatgaggaacctttggatctgggaatggaagccttctgtggggccgcatgggggacaaacttggaggggagagagaagaggctgggtgagggtccaggccagagcggaggcccgagtgggggctggggccgtgaaggtggagaagggccagggccagagagttaggtctgctgggctgttttgggaagcatagagaacagcatctgagacaggtcctgctctgtgcctgttgggcggtgggtcatcaccgaaataaggagcctgagagaaagagccgggggcagatgataagctgggttagaaggcagtgactttgaggggtcccagggacgtttaggaggcagctagatacctaggtgcagagttcagcagaaaagtcagagagtgttgagtctctttcctcagggcgctggggagctgcagcaggagtgtgagcagtgaagaagtaggggcagctctgggtgtagaaagaaccctctggggtcgtgtcaaagatggaccagagggagagtctggaggccgggagaagctggtgcaatacgttcaattatacttactgaatgtgccaggaacaaccgctgtgaccaaaactgcaaaccacctgtcctcgggttgcttatattggggtggagtctggggagatagacaataaacataatcgataaaatatcttagtatcttagtatgtcagttggtgatccctgccatggaggaaaacagagaaggggaagagaaaggggtgatagtttttttgtttttttgagatagggtctcactttgtcacccaggctggattgcagtgatgtgattatacctcactacagcttcaaactcctgggctcaagcgatcttcctgcctcagcctcccaagtagctgggactataggtgtgcgccaccatctttggctaattttttaaatagtttgtaatgatggtgtcttgttatgttgcatgggttggtcttgaactcctgggctcaagtgatcttcccacctcagcctcccaaagtgctgggattacaggcatgaactaccgtacctggctgggtgataattttaaataggttggtcagggcaggtggaaatgacagggtccagttgagcaaagacctgagcaaggtgacagtgacagcgacagccatgcagataatctgtggaaagagattttcaggccacagggaatagccagtgcaagaccctggggcccgtggggctggagtaaaggtgaaatcagagagatagcaaggggccacctcctgtagatcctcatagacagggggttctcaagccccagcatacatcagaatcccctgggagcttatttaaaatgcagatttctgggcttcaccacctctgaccaggaggtccaaggtagggcccagacatggacgtttctgtcaagatcccagggaatgctgatgctgctgctccgggaacactctttgagaatcactgttgtaggcccttggaatgacttttgttttttgctcttgaaatgggggagctgttggaggactttacacagagagacaggatctgacctgggatttaacaagatctctctggcagctgtatggggcctggacaaaggcaggaagacttccagtgagaagccggcccatggtggcttggaccagtcacagtggtccgggggcccagatgaggtctgagcagagtggggtgggcataaggatttgaccgtgtgccaggcttgcccatgcgtgcaaaaggctgtgtttgccatacacagagtcattcatattaagtatcttcctaaaggatatcctctaccggccctgtgaggctgggttttatagccccgcttatcagaagggaacgctgggctcttctggacaagaacagtaggcccaggatatatttggagatagactggaccagatgtaggtgggtgagggcaatgggaagaatcaaggatgacttttgcgtctcctccagagggagcagcagggagatggaggagctgatgtaggctgactgcctcttggtgatcccaggtgatcttatttgtatatatgtatatataaaccatggagtagatgacgtggtacagactggatgcagtattaggtgtggagattatgtatgcagcgattaggtgtggaggctctggagcctgaccaccagggtcaaatgtagccatgtgattttggaccacttctctaatctccccatgcctccgtttccccacctcaaacttggagatggcaatcctaagtttgccagccttctctaacactcactacgtgctaggagccattctacacacttagtgacaccatctcatacaatcattaaacgatgccatggaagagtggggatgaggatgctttcatggttgtatggcgtctcatcctcccgctaattctgtgatacagacactgctgtcatcctcatttgatgaatgaggaaactgaggatcaggaaggtgaagtcacttggccaaggtcgcatggggaggagggcttgtgattgatactcagatctgagacaggtgtgctcaagacggaagcaccaggactcagacccagatgatctgaaccagggtcagagctcctgacgatatgcaactcctctgggggagactttacaacacccacccatgccgccttatggcccgcttgctataacccaggccacttggcctgttcggaacatttcactccacttatactcccctggtggagtataagcccacccggccaccatggcttacttggtatatcccacgctcaccctgcccatgagtcatttgatttggcacatagaaattctttggatgactcctccaacatcctggcctctcatttgtgcaccccagtctgaccacatgctcctgatcatcctgccatcttgagaccacactcctgctctgtggccaaggagagaccactgggtcctcatttggaacccacttctgggcatcagtgcttcctctctccaagtgtatatccagtgatcattgttttaggcactttcttgccaatatcctcagttccctccctttttgtatggctttaatcacagaggacgctttcccctgtccctgcaatggctttaagcccgtaggaagtttagctctcctatataaagtaagtcttgtggtaggcacttaaggctaatatggcacctccatttcttggggatccaagctccttcaagacttaatatcccagggagtagcccttgtcctcatggtcccgtgtggctgctagagctccaaccatcaaaacaaattttcaggcagcaggatggatgaggggaacaataagatggcaccaccttctctgtctttgttttttagagacagggtcttgctctattgcccaggctgggtggagggcagtggtgcaatcatagctcactacagccttgaactcctgggctcaaccatcctcccacttcagcttcctgagtagctaagactacaagcacaccatcacacctggctaatttataaaaatttgtttagagatggtgtctggatatgttgcccaggcttgtctcgaactcctggcctcaagtgatcctgtcacctcagcctcccgagtagctgtgattccaggtgcggtaccacctcccttttaaggccacctcctgtgactcacataacacatccatttgcatcctatggctacaacttggtcacatgaccacaactgcaaggaaggctgggagatgaagctttttatctgtgttctgtggatataggttatagatatataggtatttggaggcagtgaacaattcctgtgtgttggtttgctaggaccactgtaacaaagtaccgtagactgggtgactcgaacaacagaagtttctgccttctagaagtctgagaccaaggttttggtgtcagcagggttagtttcttctcacgcctctctctttggcttgtagatgccttccttcatatgtccctgtgtgcatctctgtgtcctaatttcctcttctcataaggacaccaatcatactgcattacagcccaccctaatgacctcattttaacttaatcacctctttaagaaccaagtacagtcacattctgaggtactgggagttaggacttcaacatacaagtttggttgcgggggatggggggtgggcggcacgatttagccgataaaaccctgccacattactgatttccacaaatcaccacgagatcaagtcagctgtctattcttattccactggaacaagccacaaacccatacaatttggaggccattgcagtggtcaaaacacaaggccaggcatggtggcccacacctgtaatcccagcactttgggaggccgaggcaggcggatcacctgaggttaggagtttgagaccagcctggccaacatggtgaaaccccatctctactaaaaatataaaaattcgccgagcatggtggtgggtgcctgtaatcctagctactggggaggctgaggcaggagaatcacttgaacctgggaggtggaagttgcagtgagccaagatcacaccactgtacgccagcctgggcaacagagcgagactctatctcaaaacaaaacaaacacctacaaagacaaggaacataaaagagtaaaagatgggtaaatatagaagtgaatagaggctggggactatggagaagtggccggtgtgtgccccatttcaagggagtgactgctacccatctccagctaattgctgccttatggaaatgcgatctctgtgttacagctcttccaactttgtaaaaaagagatgccaaacgttttatttgacattccaaattttatatgttggcaactggttcattttcttttaaacactttccaggccaaatataacacatcccagggatggatttgggtcataggccaccagctggggtctccagttcaagttggatcctggaattcattgtacaaatacttactgagcacttctaagactgagggccctctccaggatccagaggacacagtgctacagaagaacatgtttatttacttacgagacagacataagtgatcatcatctatatataaatatatgtaattgcagacagatgagagctaggaatgaaatgattgcgatgagagacaaaaacagggaacttggttagatttgtggtgatggaaggatgattaggagaaggaaaaatgtgctaaaaacaagccagcatgtgcaaaggccctgaggtgctagggaatgtggtggttttcatattaaaggaaatgaggccaggcacggtggctcatgcctgtaaccccagcactttgggaggctgaggtgggtggatcacttgaggtcaggagttcgagaccagcctggccaacatggtgaaaccccatctctactaaaaacacaaaaattagccaggcgtggtggtgcacacctgcagtccctgctactcgggaggctagggcaggagaatcacttgaacccaggaggcggaggttgcggtgagccgagatcgcaccactgcactccagcctgggtgacagtgagacactgtctgaataaaataaaataaaggaaatgaaaggtgggcagtagggatgggacagggagggagggggaactaggccaaaccatgtaagacctaataggccttggtgaggaatttgatctttatcctccccttctccccccaacaagctacatgcaggtgatgtccaggaggacttccatcctggagagattcaggaggcagaagaaaggagacttagggacttgttagccttcaactacagagggcgggtgatgagaagaggagcagagaatatggtaatgagaggggtgaagaggggccagggaagggcagataccatgacagtacgtcctgtgagctagggccagcctagccctagccaggctagatcagaatgcaggaccaaggaccaagccctgggggaagggctttactacacaggccgtcctcccctccactctccaggatcctttgaggttgccttccctgatgctgcggagaaaatgaagaaggtcattacacagcttaaagaaggtaaaatacactccatctctccttccccagacacacacacacacaattagaaaaccccacttttggccggggatggtggctcacgcctgtaatcccagcactttggaaggctgaggcgggcagatcacttgagatcaggagttcaaaagcagtctgaccaacatggtgatacccatatctactaaagatactaaaattagctgggcgtggtaacgcatgcttgtaatctcatctactcaggaggctgaggcaggaaaattgcttgaaccctggaggcggggttgcagtgacccgagatcggcactccagcctgggtgacagagcaagactccatctcaaaacgaaacccactcctgagaccccccatccactccccgtacaatcccctggccccatctctgagcctcagaccttgagggacgactatttccccgcgtggaccatttttgatctggccccgccccttcgatgaaaggtttcgtctccaactgagcccctttccgggactactactaacctggccacgcctcttctctaactgggccaccaccttagccttggtctcctgcaaggatcgcccaggatctagccccgcctcctcggtggaatacacctggattgcccatccccatcagggcctacagaaaaccagtgtgtttccctctaaaccccaagtagaaggctggcagcagtcctgggcctgacctcctagtggaatgctcaggcttggccccggccccaggtggaacccagccggcttgaccccgcccccaggttatgacgaaagcttggccccgccccctcggagcaatgcttcgggccttgtaacattagctaggggagcatcgggcaagggttcttcccatgactgtaaggtagtgatgtttcctcttcctccacagcccaggcttgcatccctccctgcggtaaggacttcatctaaaacttggaaattgcggggtaagggaggcggtcggggacgaaacgtacgacatcaagtgtgggaaagcgggtgggcttcacatccttaggaagccaataagatccctggagaaaaggaagaaaaccaagtattgctctaaatcctcagaaggtgtgtgtgagagccgaagcaaaccaataggaatcctagagggcggagaggagtgagagtcggccaaagacagcagggagggcggggtcaagatgccacctggccgatggaccccgggaagctgcatggatctcaaatgggccaagggccccgggcttggaagggcaggtggcgcctagacccagcgttcccgctccacaggtctccaggagttcgcccggcgtttcctctgcagcgggtgctactctagggtctgcgacctcccgctggactgcccaggtgagggggcggggcctcggggtgcaggaggccaacctgagaaaagggaccagagcaccgaggggcataagctggtggcgaggccagacgtggtcggggcccagcgagtgaaccctgctccgtcttcagttcaggatgtgacagtgactcggggcgaccaggctatgttttcttgcatcgtaaacttccagctgccaaaggaggagatcacctattcctggaagttcgcaggaggaggtgtgagtcggggcggggccggcgcgaagagtttagacgggcgagttagccttcactagaggttggggagtcagcttgcggggacgggactccgggaatctccgtctagacacaagcatcagcaagaggagggtcgcgggatttaggggagagctcgaagatcagaatgcaggaccaaggacctggggcgatggctcacgcctgtaatcccagcgcttttggagaccaaggcgggaggatggcttgagcccaggagtttgagaccggcctcggcaacaaattaagacccctcctctgccaaaaaattttaaaaacagccggggcgtggtggtgcacgcctatagtcccagccactggggaggctgagcgggaagactgcttaagtccaggagtttgaggctgcagtgagctatgatcgcgccactgcactgcagcctgggcgccagaacgagaccctgtctggaagaaaaaaaaaatacataaataaaagcagtttctaggggtaggttatgcgtaagggtttaaggagtgaggggaaggggtgcgtttagggcaggggagcgagaaggctcgggggcgggctcaaggctcagggccaggactccagggggcgtggtctggctcggggggcggggcttgtaggttactcagtggcaagccggagttgaggcgtttaaacccgcgtgtcccgcagctccggactcaggacttgtcctatttccgagatatgccgcgggccgaaggatacctggcgcggatccggccggctcagctcacgcaccgcgggacgttctcctgcgtgatcaagcaagaccagcgccccctggcccggctctacttctttcttaacggtggggcggggcgcggccgcgtgagtgagcggggtcgggagaggggtggggctcgtgcctggctgacgtgcgcgcccccgcagtgacgggcccgcccccgcgggcggagacagagttgcaggcctcgttccgggaagtgctgcgctgggcgccgcgggatgccgagctgatcgagccctggaggcccagcctgggcgagctgctggccaggcccgaggctctgacgcccagcaatctgttcctgcttgcagtcctcggggccctcgcatcagcgagtgcgacagtgttggcgtggtgagttctggggactccggagccccagcatctagctccccgctgtctcagatcccaccgagaagtctgggttcccagcaacctccaacccaggaggtcaggctttcagttcctcctctctcagacccacgagtccaggtcccagcccctctttactagcccaggaatccaagtccccagccccctcctcccttagatctaagagtccaggcccccagcccctcctccctcagacccaggagtccaggtccgcagcccctcctccctcagacccaggattccaggccccaaacccctactccttcagacccaggagtccaagtccccagtcccctcctcccgcagatccaagagtccaagcccccggaccccctcctccctcagacccaggagtccaggcccccagcccctcctccctcagatccaagagtccagacccccaagtttctcttccttcagacccaaaagcccaggccccctgccccctcctccctcagaaccaggagtccgggccctgtacacctttttgaccctggtgtccaggctccgggacctaagtttctagtcaccaacccctcctgtaacacacatacctctttgtttccccaggatgttctttcgatggtactgcagtggcaactaacaaaggtatctttcctccttccctatcctatttccatcctgaaaataaagaatatatttcaactctagattgtttcatctccgaaggtggtcactactaactcaggtaggaggaggtgcagcaagcccacacatgcccagatgaatatggcccgcataatgacagtgataggcatagctatcccagtgcaagttaggtgggaacccagataccccctcaggttactggctgtctccttgacatttccatctgcagaaggcaccctcaaatagagtcctccatgttgccctcagaggctgttcctccccaaggctttcctcctaccagaaagagcaacaccatccacctagcagttcaaaccagaaaccttggaatctaacttctcctccacttccaattcattttcatttccaaccctcagactttttaactcctaaatatctcatgaagctgccttctctgtggtcccagtcacccccacctcatgtctggatcactggagcagccccccaccacctccttggcctctctccactgtagcccattctctacataccagcaggacttgttttattttattttatttttttggaggcaccatctcactccaaggcccaggctggagtgcagtgatgtgatgtcagctcactgcaacctccacctcccgggttcaagcgattcttctgcctcagcctcccaagtagctgggattacaggtgcccaccaccacacccggctaatttttgtatttttagtagagacagggtttcaccatgtggccaggctgttcttgaactcctaacctcaagtgatccacctgccttggcctcccaaagtgctgggattacaggcgtgagccaccaagcccggccaaggacttaggttttaaagtgtgtcagattgggttactcctctacccagaatcctttagtgactccctgttgccattgagacaaaatccaattccttgtcaaagcctcagaggttccacaggtctggcctttgctgacctcaccagcagccttgtcccatacccctttcctccttgatcttgccaccctgcggtttttctctggcctttcctccttcctcgcattcatcatgatacttcttgccctctctagggtcttggttcacactgtttcctgcctagaataatattttctccttttttttgtctagttaactcttatgatttcccctgagtagccattacatctattaaccccgctaatccccttgacaagtctgcgcggctggcactgtattgacttaactgactctacctctccctcaggccccttgctactttccagccccagtggcctccttattaggtccctggaacatgcaagtctcagtcccatttccaggcctttgctgtgcttcatacttgaaatgactttcctctgagtatcacaaacccacctctctcattgcacagatcccagatcaaatgtctccttctctaactacctctctctccctgtttgacattgcccaatttcaccttgttcactgagctcatctggacctaatgttaactcttttttttttttgagtttcgctcttgttgcccaggctggagtgcaatggtgcgatgtcggctcactgcaacctccacctcccgggttcaagcgattctgctgcctcagcctcccgagtagctgggaacacaggcatgcgccaccacacctggctaattttgtatttttggaagagacagggtttcgccattttggccaggctgatctcaaactcctcacctcaggtgatccacctgtctcagcctcccaaagtgctaggggattacaggcgtgagccaccgctcccagccgttaactcattttttaatttggttttgcctttcctacctgaaagggaagctccttttgagcatgtactcattcttgttcactggtctatttccctttattgatttgctcattcagcaaatatttattgagtgcttactattttgtcatgtattttcaaggcactgtagagatcccaatgaagaaatcagaagagacaaaaagtttgtacagtactcacatggaacttacattctagtggacagtaaaacaaaactgtttctctctctcccttttttttttttttttgttttgtttgagatggagtcctggagtgcagtggcacaatcttggctcactgcagcctttgcctcctgggttcaagcaattctcgtgcctcagtgtcccgagtagctgggactacaaaggcgtgtgccaccatgcccagctaatttttgtatttttagtagagacggggtttcaatatgttggccaggctggtctcaaactcctgacctcaagtgattgcctgcctcagcctcccagagtgctgagattataggcgtgagccaccgcgcctggccagaaaactgtttctctactctcaacatttctgacactacatgtatgggattctacctcctgcccccataccaaccagttctccaactctcccggacaccagttgagtgtcctataattcatttaattctaaaatcaacaacccagggttagcgtcgcactacacaggttttaagagctcaggcccacaagactgcccccacttcagacaccagtcgcaagccaggggctcctgcaacctgcagccccccagctcagtaatttgctagaatagcttgaataactcagggaaacatatttactggtttattataaaggagagtatgaaggaaatagcttaatagccagatgaagaggtagatagggtgaggtccagaagggtcccaagtgcagaagtttctgtctccatgggagctgggatgcagcggcctgtcagtgcgtggatgcactcaccagcctggaagctctgcaaaccccatagtttagggattgttctggaggctgcaccatgtaggcatgattgcttatgaacttagtctccacccctttttccctccccaaggactggagggggcagcgggtgaggccgaaagctccaagctcctaatcatagcctagtcttgctggtgaccagcgctcttccaggagaccaccaagagtcacttgaatagaacaaacgatgctgttatcacccaggaaattcaagagattaggagctctatgtaagacgcttctgttgcccacatcactccagaaagtacaagggtataagactgtcagaaaccagggacaaacaccaaatatgtatttcttactatgtcacagacaataagaaaacagtaaaatacgaaatatggtaatatgtgtgatggagaagataagcagagaaatggaatatggggccgagggaagtagcagtaggatctgtggagaagccctcactgagaaagtgacgtttgaataaaaacttgaaggggatgacggtatgagccattatggatatttgtgtgaagagtgttccaggtggccaggcgaggtgactcatgcctgtaatcccaacactttgggaggccgagacgggtggattacctgaggtcaggagttcaagaccagcctggccaacatggtgaaaccctgtctctactaaaaatacaaaaattagcctggcatggtagcacatgcctgtaatcccagctactcaggaggctgaagcacgagaattgcttgaacctgggaggcagaagttgcagtgagctgagattgtgccattgcactccagcctgggcaacagagtgagacaatggcactccggcctgggcaacagagtgagactctgtctaaaaaaaaaaaaaactgttccaggcaaaaatttaaaaagggaaaagccctgaggcaggagtgccaggcacatgggaggacagccgggaggacatccaggaggccagtgtagctggaacagggccttaggaagtggatacacagtgaagtcagagaccatggggaccagatggtgctgctggctgctataaagtctagacttacctctgtaagagatgagggtcggctgggtgtggtggctcacacctgtaatcccagcactttgggggaccgaggcttgagcttgagaggtcaaggctgcagtgagccatgattacatcactgcagtccaacctgggctacagagtgagaacctgaatcagaaaaaaaaaaaaaaagagcaaggtgcagtggctcatgcctgcaatcccagcactttgggaagccgaggcaggcagatcacctgaggtcaggagttcaagaccagcctggccaacatggtgaaaccccatctctcctaaaaataaaaaattagccaggtgtggtaacaggtgcctataatcccagctactttggaggttgaggcaggagaactgcttgaacccgtgaggcggaggttgcagtgagctgagattgcgccattgcactccagcctgggcaaaaagagcgaaactgcatctcaggaaaaaaaaggcaaaaaaaaaaaaaaaaaaagatgacatgagccatgactgcaccactgcagtccagcctgggctacagagcaagactctgtcacaaaaaaaaaaaaaaaaagaaaagaaataaaagatgagcgtcacgggtggcttttgagccaagcaagggcaggcaggtcatgacttgatttccatggctactgtgtggctaacagactggggcaaagtggaagcaggcatcgctgtgaggtgctgcagtaatccagggacgagatgcagccctggggaacaaggtcgtgaggagcagtggctctagatatgtcttgaaggtagaatcagtgggatttgctgatggttcagaatgttggatgagagaaggagagaggccaagagtaaccacagtggcactgtgcagtcaaaccctctgccatgttggaaatattctagatctgcaccgtccagtagcgcagcaccagccacgtgtggccgtgaagcatgtgaaaggtgacctgtgcgactgaggaactgaatccataatcttaggtagctcttcaggcaagaaagggtgtcaaaaaaaataaaaataagaaaaaaatcaactcaggtagctgtaataactttaacattacatagttcctgctctatgacaacagcatcatagaggcctatgtgagtattcttacctgtggctcactcttaactctttgtttacttgactaagagctccttgaaggcaagcttcttaattgtttctatacttgcagacttggcagagtgtgtggcattcagtaggtgcttggtgaatgttttggtgactgatgaatcaaagaatgcatgaatgggaaaaaaatgttttagacttccatgtggtagtggctagtgatggacagttacagctctagcattttttggcctgagcagctgggaggatgaagttctgtttactgagatagactgatggaggagcaggtttcacggggattagcagggaggaaggcgagaagatattaggagtctggtttgagatgcctattaggcatccaagtagaaatgtcttggaggcagttggatatacaagcctggaatttaagggcgaagtctggtctgaagatctgtttgggagtcccgtctccatacatggagcatgaatgaagtattcagagccataacactggaggcacaagggaaatgggtatagatgggtaagagacgaggatgagaggatccaggaaagaaaacaaggtggaggaaagcaaggtagctgtggcttcctgaaagccaagtagctatgcttggtggctcacacctgtaatcccagcactttgggaagccgaggctggtggatcacttgaggtcacgagtttgagaccagcctggccaacatggtgaaaccctgtctctactaaaaatacaaaaatcagctgggtgtggtggcacatgcctgtaatcccagctacttgggaggctgaggcaggagaattgcttgaacctgggacgcagaggttgcagtgagctgagttcacaccactgaactccagcctgggcgacagagcaagaccctatctcaaaaaagaaaaaaaggaagtcaagtaaagaaagcgtttcaaggaagagtgatcaactgtgtcagacacagccaaatcatgaaatagggctgagaattggctattggttttagcaacgtggatatcattgatgaacttgacaagagcagtttctatggagagctaggggaaagcatgaccatctgattggcttgggtttaagagttaatggaagtcaacatcattagtcattagagaagggcaaatcaaaaccacaatgaaagccacttcacacctgccaggaaggctgtaatcaaaaagtcgggtaatacaaaatgtagcaagggtgtagagaaattagaaccctcatacattgctggtgggaatgtaaaacggtacagtccctgtgcaaaacaggctagcagttcctcaaaaaaattaaacatagaattaacataaacccagcaattcaatttctaagtatatacccaagaaaattaaaaagctgtgcccacaccaaaacttgcacacgaatgttcatagtagcatcattcatacagccaagaggtggagatatcccaaatgtccatcaactgataaatacataaacacaatgcaatatagccatactgtggactattatttggccataaaaaggaatgaatcagtgatacatgcaacaacatggatgaaccttgatatgctaaatgaaggaagtcacaaaaaaaagcacatactgcaggattgcattgatatgaaatagccagaataggtaaatctataaagagaaagcagatgagcagctgcccaggtcttagggggataaaggggtgagaaaggagaagtgagctgccaatggatatggggttccttttgtggggtgatgaaaatgttctaaaattagattatggtggtggctgtgcaaacctgtaaacttaactaaaaaccattgacttgtacacttcttttttttagatggagtctcattctgtcacccaggctggagtgcagtggcacgatctcagctcactgaaacctctgcctcccaggttcaagcgattgtcctgcctcagcctcctgagtagctgggattacaggcacatgccaccatgcctggctaattttttttgtatttttagtagagatggggtttcaccatgttggccacgctggtctcgaactcgtgacctcaagtggtctccctgcctcggcctcccaaagtgctgggattacaggtgtgagccaccgcgctcagccaaattgtacactttgagtgagtgaactctgtgcgagataaattggagacaaatatggacaactctcccaaggaaatttgctattaaccgaaatagaaatggaacagttgtttacagggaaactgaggtcaagagtgggggtcttaaaagtgggagagtaacaatatgttcagatgctgatgggaaaggctccgaagcgaaaggagaactgacggaggatcaggtgggaagaactgctggagtgaagtctttgagcagacaaagaggacatagggtctggtgccctgatggaagaggttggcactggcttggagcacagacaggtcaccctcagcaacaggaagaaggtggagtgtatggacacaggggcaagtgagtgggaagacgtggagatggggactccagcagaagttttcttttttaacccctattttctcagtgagataggaagccagctaagagggaggggaggaggtgctggaggtttgaggagaaaagggatgtgttacccttctaagtagacggaccagagacaaaagcaccatctgcagtacctgccagtgtgcggcaggtggcaggtgcttggtaagtacccgtgaatgagttgagtaatttaaccctcacaccaaccctgccccaggggattaataatccctgttttcaaaagagggaaccccaggttccaaggaaggagagtgtcttgtccaggttcaaacggctagcacccagcactgagcccagcgtccccaattctcaatcatccattccccttagttctcaaaaaggtggaggctgggggaaaataaataaaattctttattacatcctgatcacacagtagaaatggagattaaataagaacgaggagaaagcaggaccctttccctccactcctcagatcccacaccctgaccaataaataccctccctggagacccagaagtcccagtcccaatatagtccagactgaagaatcttgggctgaccccctcgttttgcagaggagggaaactgaggcccagagaaccacccagcaagttcgtggctcggggcccagcagctctcctctggcctcccctgaagacccttgaggcggcatccgcgtggctggactcacacctggacgcggtagcccccggtccgccgccggcaaagcctccgcacgcccacccagtacagcgtcaacatggccacccagtagcccacgtaggcgccggcccccgcggccaagtggtaggcctcggctgcgcgggaagggccgctccagtcggccctggcctcgtgtgctacgctgcggaccaggcccccaagcagcagcagcgcccagagcgccaggggcagcagagggacgtagttagcggccagcttccgccggcccgaggtgccccagccactctggttcatggtgactagcgccaggaacttggcaggcaggaggccacacatgtagaggggcgcgtagagcgacagaagcaccatgcgcaggcagccccgcagccaggccgcgaaggccgccttggccagtgccacgccctgcacgcacagcagcacccacagcagcgcccaagggcggcccgcgtagaacagacgcagcacagtggccgccacgaagaaggggaacaggccggagaccaccgcctcgtaggtcatccacgcatggtgccggtgccaccagagcgcgttgtacagccactcacggaagtacgacttggaccagcgtgtctgctggctcagccaccgcaggaaggacgagggcgtctctgagtagcagcgggacctggaggtgtacctgcacgggggcgaggaatgagggcatcatcgcgtgctccctggggcctgggcaggattctggaggcagaaatgaccactgtggacggccactgggggcgagtttcttaacctctctaggcctcagtgttctcatgtgtagaatagggtggataatggttcctaggcctggacgcggtggctcactcctgtaatcccagcactttgggaggctgagggataaggagttcaagaccagcctgggcaacatagcaagaccccatctctactaaataaataaataaataaataaataagcaccaatgggtgggatgcaatggctcatgcctgtaatcccagcactttaggaggctgaggtagggggatcacttgaggctaagagtttgagatcagcctaggcaacatagtgagaccccatctctaaaaaaaaaaaaaaaaaaaaaaaattagccgggcgtggtggcctgtagtcccagctatttgggaggctgagatgggggaatcacttgagctcaggagtttgaggctgcagtgagccatgatcgtgcccctgcactccagcctgagcctgagcaacacagcaagactctatctaagaaaaaaaaaaaggctctcataagacaaggatactgtaaggattgaatgaaattaaacgccaagtgcttaggaccagtagatagtatttgctcaataaatgttagctactaccgtttttactatgactattgctgttaccattactattgctgttactaatatcatgttggttactgacactattactaatactatcactaacatattactaatactaccatgcttactattactggcaggccctatagggaggagcaagatgggtgtggttgctacccagggtagtctatgtattagaacttctcaagggaaccatcaggcctccttcctgttttgtggcagacatcattaatcaatccctgcatggtttccagccaagcccacacaagaggagaatcctgggcattacttgacagtgtccagactccttcccctgtgtcacttggcatcctcagtggcctccctgcttccgaccttgccttttgtagtctgtacccaaaacggctgccagagggatcccattacaacgtgtcacttctctgcttaaaaccctcccatggctccctcatcttagtcagagtccttagacctataagcctttcatgagtggaccactccttaactctccatcctgctctcctaatactcccccagttcagtgctccagccacactattctcagccttgagccccatcctacctcaggcactccacttaacacttcacccccaaccccaaaacttcctatccaccacccttgcccggcattatttatctccataacacatatcatgaacatactgtatgttctacttatttatttcttgtgtgtctccccaactgatgtaatcaattggtgtcctgtctgcctattgctgtatccccgcagcttaaacattctaggcacctagtgaatatttgttgagtgaattaatgcatggattcccctggattatcccaagtttcctctgggtatttcagtggacctggctttgcagaaatcactctcccctgaacttcacttggtctagatcatcctcccctgagtctcatggaattacttgtcttctcttgaagaacttactagagttcaggtgctcctcttctctcacttgtttctttctccgtggctctctcactagttagatcccactctatccatttgtctcttgcccttcctacttcactccccactgtgctaccttggtctccatgacagaaccaactcaccctatctcaattctaggtggaattctctaccctcaccttgcctctcttggtagagttcaccgcattccatggttcaatgcaaatgccagccttgtcccttatagtatcttcccctcttccctaatatctcacttggtagagtccattggctcaatgcaaatggcccctctgcccattatggtatcctcctctctcctctaaagtctcacttgatagagcccattgtctggtgagttactttggatttggagaactctcagcatgcacacacgctaggatattcattggcctccacacatacccgaccacctggtcccctcagcttacttggtagcataacccatgctgagcatgcggttggtgaggtgccggtcatccccaaaagtacagtgggtacccaggaacttctggttgtaccaggcctcaagaaactgctgcaagaggttattcctatataggcctgggtggaggggaggtgtgaaagagtgtcagcctctgctgtcaccaacaccaactccaatgctgtttccagccccaaccccatctccagttccaaccccatcctcagtcatcataatctcaatctcagcactatctccaatcccatctccagcccgaatcctgtcctcaacctcatacgcactccaacttgcctgtcattgaactatacccactgtgactgcaaacctgcccaccccagtctcatcaccaatcccatatccattctcagccccatccaaaacccactgcaacctcaaacctggctccaactctgtctttgactccaagcctatcccatcttcttccccagccccagccccaatcgtcatccatatcctttttccaacctcactccccacaccaaactcagcttgagcccaagcagcatcctcaccgccagcttccagttttatcccatccccaattcctgccctgctgcatctttgttcccaaccccagtcacatcctcagccccatccggcttcccttctccctttccaccccatccacagccctcccaatctctgcccctgcttacctagaggaccgctgatgcaggatacacagtggaagtagctctgacaagcccgctccacattgaaggctacccagtatcgcaggctgcttaggaagctgacccaggagtccagagggttaaggatccgcacgtccccaccaacagcccctacccgggggtcctcgtccagtacccgcacgagctccagcagtgccatggggtccaaccttgtgtccgagtcacagacctgtaaggtggaaggggccaggatcagcacagacccctgcatcaggctgatgcttgagaggaaggcatcaaggggtgcaatgcagctggggcactctgcaaccgatctgaacataattttgagattttttaaagtcattttcaatgtgtagtcacagtttaacatgtactccaagatgcacatccttgtatgaacatgaacaataagacatataccatctcctctggtgtgtgagtgagacccctaacttgctactaagcaatagaatatggcagaagttatgggatataactgccatgattatattacctaatatggaaatggtgaataggttttgcaatgtaattaagtccccaaatctcttgactataagttaatcaaaaggagattatcctgggtgggcctgacctagtcaggagaacctttaaaagcagacctagaagtcagagagtctccttgctggccttgaagaggcaagctactgctaccatgagttctatggctgcaagaaagtgaattctgccaaccaacaaatacatacgcttgaaagataaccccaagccttaaaaaagacccagctccagctgacaccttgattgcaacctggtgatatcctgaaaaaaggatccagttgagctgtgctgactctgggctcatagaaactatgagataataaatgtgtttcgttcaagctgccaaacatatggtaacttgttatgcagcaatggaaaactaatataatgcattagaattgctacaccaggccaggtgtggtggctcacacctgtaatcccagcactttgggaggctgaagtgggcagatcacctgaggtcaggagtttgagaccagcctagccaacatggtgaaaccctgtccctgcaaaaatacaaaaattagccaggcatgatgacaggtgcctgtaataccagctactggggaggctgaggtgggagaatcacttgaacccaggagacagaggttgcagtgagccgagattcaaccattgcactccagcctgggcaacggagtgagattccatctcaaaaaaaaaaaaagattgctacaccaaatgggatggatgaatgagataaataaatgaaattaatctgtatattgaatacatagatagatggctgagtggttgaatgaaagaatctcaacactgaaggaggggaaaggaaggagggaagaaggaaagaagaaagggaacaaatctccacatttaatagataaatgaatgaataaatgagtaaatgatctccatattggatggatagatggtatatccatgagtgagtaaagaaaaagaatttctacactgaatgaagtaaggaagaacttttatttatttatttatttgagacggagttttgctcttgttgcccaggctggagtgcaatggtgcaatctcggctcaccgcaccctccgcctcccgggttcaaaagattctcctccctcagcctcccgagtagctgggattataggcattcgccaccatgctcggctaatttttgtatttttagtagagacagggtttcaccatgttggccaggctagtctagaactcctgacctcaggtgatccgcccacctcagcctctcaaagtggccggctggaagggtttaattttacattgaatggatggataactgaatcagtggatgaatgaacaaatgaatctctatattgaatggatggatagatgaatggatgagtcaagaatgagtgaaattgtctcttcctggaatgcgtaggtgaatgaaaaaaggaaagaatgcctctacattgaatgggtaaatgaatgaataaatgaacgaatgatctccatattggataaagggatagatggatggatgaaagaatgagtgaaggaaagaatctctccactgcatggatgaaagaataaagaaagggagagagtcattcaaatctgtacattgaaggaaagaccccaggaaagtgggatttgggtgttcgggtcacgagtgggctgaaggcgcctctactcacctgcacgtagtccaccgaatctccgagcgccttgaaggctgtgtacatgacctcgcgcttgccgccccagcgctgcgccacgcacacgcacctgcgagtcctcaccagcgcctccactgccagccgcccaggatcctccgcctccacctcccgataggctccggcgcccaccgcgcccgccgccgcgggttcccagggctggtggtagttgccgtcccacacgtacgtggcggggtcctcgtcagcgaagacctcgcggaacatgtcgaccatgtagaggtcctcggcgcggttgccatccaccaccatgaggacgcgcagccgcgcgcgcgggtacagcagggcgcgggcggacgccaggcactggcgcaggtacgcggggtcctcctggtaggcggagatggtcagcgccacactgcgcgcggtggctgcatccagcggcccccgcgccgccgccgccacccgccggtgctccaggtacgcgaagaggctctgcgccaccaggtgcgctgaaaggaaggccccgtagaggccgaaggccaggaggccgtagcgatcggaggccagcggcaccccggcggcgtaggcccaggtcatgaggcccaggatgagcagggcgaaggcgatggtcagcaccctccgggccaggccggagcagcggcaggctgcaggagtgggcttgggcgcgtcctgctgggagcgagaggggaaaggaaggggcatgagtcccgggcgcatgagcctcctccgagagaagattaaaaatcctttccttccttccctccttccctttccctcccctccctctctctctccctccctccgtccttccttctctttatctttctctctctctgtgtctgtctcgctgtctctctctctctctcgctctcgctctccctttctctctcctttcgttttttgttttttttttcttttgagacagggtctcactccagcctagtgtcgccatctaggctcactgcagcctcagcttcccgagctcaggctcagcctcccacctcagcctcccgagtagctgggactacaaagagtgtgccacaactcctggctaatttttaaatttttggtagagccgggggtctccctacattacctaggctggtctggaacccctgggctcaagtgacttgcctgccccggccttcctaagtgctgggattacaggcatgagctacctcgccgggccccaaaattattttcattaacgaaaataattggagcaaatagctatctaggcttcatgctgattagattccttcttttcattattatttatttttatagacagggtcttgctctgtcgcccaggctggggtgcagtggcaccatcatagctcactgcagcttctaactcctaggctctggcgattctctcacctcagtctcccaagaagctaggaccacaaggctggagtcactatgccttgctaattaaaaaaaaaacaattagaggaggggtctcactatgtctcctaggctccagtctcccaaagtgctatgaatacaggcatgagccaccaagcccagcctgattttgtttcttccaatacaacttttttccacgttttgaaatctcttaaatccgtgaggatgattgcatgcgatggagtgtcacaatttaattactagggcgtttccctcctctttcttagtggcacatacaatgaggatttatctcccaatcaaaggtttcttagggttgagacagtaataataataacacatactaaaaaaccaaaatgctgtgtaccagtccctgctctaagcctttaagatgaatgaatttattttaatctttacaacagcgctgtaaggtaggtactgttattattatccccgttgtacagatgaggcaactgagtcacacagaggttcagcaatttgcccaaggttgtccctggaaagcagaggaacctggatttgaaccctaggaactgaatctctaaacctctagccctcgggagagccctgggggacagatagtgctctgccaccatacaggtggccaaactgaggactgattggccagaaggagtggcttgcacaagatcagcagcccatggtagaggactcttctctctgactttccagaggcatagcctggttctccttttccactgcccaactccccagcagagccaggtgccccagtaaatgttgctggaagagcccagaatcagaggaaaaagtactttctgtgtgccagacactactgtacaacaaccttaatatatatatataaatttttttttaaattgagacagggagccagaaactgtggctcacgcctgtaatcccagcactttgggaggcggaggcgggtggatcacctgaggtcaggagttcgagattagcctggctaacatggcgaaagcaaaatacaaaaattagccaggcttggtggcgcacgactgtagtctcagctcctcagaaggctaaggcaggagaactgcttgaacccctgaggtggaggttgcagtgagccaagatggcaccactacacttcagcctgggtgacagtgcgagactccatctcgaaataataataataataatagagacagggtcttgctgtgtttctcaagttggtctcgaactcccaggctctagcgatcctcctgccttggccccctaaagtgctgggattataggcgtgagctactgcacccggtctctacaacaatcttataaggcaggtaccttcactgtcttctgttacagatgaggaaactgagacactgagaggcaaatacttttacccaaggtcactcaggtaataagcagagtcagaagtaaaactcaggcagtctggctctggcgtcccctctacgctaaactgcctcctatgccaccagttcctgcctcaaggcttactgtgggttatttaaatgcgtcgttaagatgtagatctttgtgtccaacacaggtgtcagcagccacatgtgtctaccgagtacttgaaatgcagccagtatcaccgaggaactgagttttaaattttatttaattttaattcatttaaatttaaaaactcttacttgattcggttattggaaagattttaaatatgtctggaacaagttgcatctacgatgccccttttataattgtaaatcttataaaatctaaacacagattaggtatttccagtgaaaaggtagcatctaagtgagaagtgctatgaacacactggattttgaaggccaagtctggggaaaagaaagtaaaatagctcattaacatttatgtattgattacatattgaaatgatcatatcttatatgtagcaggggtcggcatgctaagacctgctgcagcctgcaggctaagaatttgtgtgtgtgtttttagatggtttttgaaagccaaaagaagaataatagtttgtggagcatgaaaaatatgaaattcaaatttcagtgtccttaaaggaagttttatttgcatacaaccacattcatttgtttatacatcatctgtggctgattctacatttaccacatcgaagttgagtactttcaaaagagaccagatggcccccaaaagcctcaaatatttaatattgggccctttatttaaaaaaatgtgctggcccctgacacactgggttaaataaaaatatattattaaaattaatttcacctgtttgtttttactttttcaaatgtggccacaagaaaattttaaattagatattgtggttttcgttacatttctagaggacaaaactgaggtacagcttttaaactctcaacattaaacattattctttcttctcgaatcccccttctctcttcctttgcttcaaacctggccttgcctgagttcctagggatggctcaattcatgctggggatccagagagttgattccagaaacacagatgaacacacgtgtagacacactcccccacacgtgaactcacacatgatgagtgacacacagaatgaaattactcgtgttctacaggatgacccgagacacccactcaggccaaacacagcgatcccgtgacccccaccgacggccacacaggtgaacctgcagacacacacccctcagcaggaaaaagcaacaccagcaaaggatgtccacgtggccacaaacacacagagccccaactgagagtctggggcaatgggatgcacagggaagatttcaagagaaatagtaggtgactgtcaagctgatactgaaccagatgaaattgctattcttccaagtttagagtggctcagtatcggcgatttcatttggttcaacttaatagctattgaacgcatgaaacagaaatccattcccatgtgccacaggcaaatccaactctctttctcactcagtctctttcattcgctcactgtcgcactccctctttctctctgcctcccagggaacatagacatacacaagtttgtagcaagatacgcagatacagaaatacggacatggcacgtctcacctacatgtacttgggatggccgctcacacagggcaatgtatacacagacctgcacactcagcctcacatgctcactgtcccctacacacatatggtcactgtcaggcacatggatacacacatgaaatcatgcacacacagttccccaacacacgtggtcacacatatggcagtagttttccccacatggctgtatacacacacacacacacacacacacacacacacacacacacctgtctcatcgcagtgggtctggccgggctctctcttctctccggcttgctctcccagcctctctgtggccagagagctggaggggggtcatttgaagaccagcgcaggcgggggcgggagcgagcgctgacgtcagtcaggctaagctgggccaggggctctgaggtcacggcccagccgggcagctccacccgcttcccgctattactcccacccccctcagccagacgggcctcccttcccaggcccccatgtctacccgcgcccctcctctagtcctctctgccatcactccccctcctctccctccctcctctatgtcttcttctctcttcctcccccctctcgtcccttgtctcccctgatttttctcttccacctcacttgcattttgggggttcccctcatccccccatcccctatccctgtatttccctccatccctttctttctccctaacccactatttctcctcatctctttgttggtaccctcatctctctccccattaccacatttctccaagtttctgtctttctctccatccctttcttcctctccacttctcttgcctcctctcaccctcatttctttctcttcttgctttaaagctctccccacctcccccttctcaccttccccagtcacccccgccctgcttctccccacagccgcctctcctgtccccagaatccatctctgggttgggccccccagggacatgtctcagcaactggcagatggaacgaaactcacacacgtgcgtgctgtgggtgtgcctgtgtgtacgctggcccgaggcacggctgcctggaaccggagctgtgagtgaacatctgtccattcagcgcctaactgacgtgggtctgcgtgtgtgcaccagggtctggggtggagagctggggcgctgggatttgtatccccagggactcagggatgaacacagagagttgtcggtcagctgaccctggggagccagccggggtctgtcagtgctgtcacccatcagggaaactgagtcagaggaagggtgaaaagagatgcgggacctggggtgcccgaaccccagcccctcaggaccagatctgtgataaatgtctgtttacatgcccttctttccatgaattttttaaaaaaactatctgtatctaattctgttcttctctctgctcctcttactgtgaactattgatgtctcactttcggccttggtagctgcctcggtagctgcctcgttcttttctccctgcctgtgactccaacgacctttggtgtctggcacgggccagctccaggacaggctgaaagacatggagcagcagagagaaattcccccgtgcttctctctcctcgtctgtccctccccaaatctctgtcattttgtatctgtcaccccatctctgtttctcggtccctctatttgggtctctgcctctgtgtattcctgtctgtttctcctcctcatcccccctcacagccattctctctctgcttttacctgggagtgtctgtccctttgcatttctgaagtctccctgactttcttcttgtgtggctctctttctttctgagtgcctctccctgactttctcactgtgtgtccatgtgtgtgtgtctctttctctctgtctctttttccctctatctccctccctctctagctctgtctctatcctccttccgtctctctgcatccccatctctctctttttttttttttttttttgagacggagtctcactctctcacctaggctggagtgcagtggcgtgagctcggctcactgcaacctccgcctcccgggttcaagcgattctcctgccttagcctcccgagtagctggaactacaagcgcccaccaccacacctggctaattttttgtatttttagtagagatggggtttcactatgtaggccaggctggtctccaactcctgacctcaagtgatccatctgccttggccttccaaagtgttgggattacaggcgtgagccaccgcacctatctctttgtaaggctctatctctgtatgtgtttctctgtctctgtctctctcattcagtttctctccatttctctgtttctacatcttcgtctctccctgcagttccatctcttccagcctgtcccggagctctcccctgccagacaccaagtcctcacaccaagtcctcacaccctggggttttccccgaggaggctgcgccaggccaagcctctgcctgggcctgtcagggagaaggtgcattcccaaggagctcgaacgcccttcccacccaccagggcgggccgggctgtgtctgacgctgttgccgggagccgggctgcctggtgtctggctgtgtcaggatgatgggtcctcagatgatctgaggccagcccagagcagaaggggagggtgagtcctccgcccagtgggagggggcagcgcaggctcctccccagaagtggggcatttggctgcccagcccccaccccgccctgctcgggtggagcagctgtataaaaccagatgtttctaaaaccagagtgcggttgaggaaggataaccagggctttaatcctcaacagttccctcctctaagacccaggagtccaggttcccagcaccctcctccttcagacccgagagtccagaccccagcccttcctctctcaggcccaggagtccaggttcccatgtccctcctccctcagacccaggatcccagacacccagcccctcctccttcagacccaggagtacaggttcagagttcctcatccctcagacccagggtccagacccccagtccctcctccctgagacccaggagtccaggcccccagccccacctccctcagacccagaagtccaggtccccagcacccctccctcagacccaggagtccaggctgccagccccgcctccctcagacccaggagtccaggccccatcccctcctccctcagacccaggagtccaggccccatcccctcctccctcagacccaggagtccaggccccatcccctcctccctcagacccaggagtccagactccatctcctcctccctcagacccaggagtccaggcccccatcccctcctccctcagaccctggagcccaggcccaggcccccatcccctcctccctcagacccaggagtctcaactcccagcttccttctcccttagacctacatgtccagcccccagaatttcttgcaggaagagatgaccaaggctggaagcagcccagacaagtgctgaaagacagggagcagtgaagctgaacactcccacagcaggccggggctgttgttggagggacaggtagggacaccgcacccctcgctaacacccatggctcctagaaacccccattcctctggtggctgctctccagttcctgccctgggtccacagtggccttcccagcatttcagccatcatcaggaaacctcagggtacagcttacagaatacctggacagaaggagcacagggtgggagaggtaaggcaaaaatggagcaaaggcagaggagagaacattcattcattgtggggacatctcctgagccctggtggacagggctgggctgggcgatgccgggcacacagagatgactcagccctgggccctgcccttggggagatgccaatctggtggagaagacagctgtgtaaacagagggccacaaaacagtacaaggatgcaccaacccagcccaagagtcagggagggcttcctggaggaggtgatgctggctgatgaggcgttagccgtggtcagggtggtggtggacggtggggcaagaaaggggcatccaaggcaagaaatggtgtggccagtcaaaaaagtaagggcggattgatgctgtgaagcacaaagggtgaaacaaggggctgggggattgtagggtccctagtgaggtccgctcatttaggtttaaaaaaattttttttggccaggcacagtggcttatgcctgtaatcccagcactttgggaggccaaggcgggcagatcacttgaggtcaggagtttgagaccagcctgtccaaaatggtgaaaccccgtctatactaaaaatgcaaaagttagccgggtgtggtggcgtgcacctgtaatcccagctactcaggagactgaggtgggagagtcacttgaatgggaggcggaggttgcagtgaacgaagattgcgccactgcactccagcctcccgtctcaaaaaaaaattttttttaaactaagtaacaattatacatatttatggtatacaacatgacatttgctatatacatatatatatattcgttgtgaaatggctaaatcaagctatttaacacatgcaacgtgtcgggttttgaatgcaggaatcagaggctaggactttgctctggtggcaatggggagccatggaagggctgtgagcaagggaggggcaggatcagctctttgtctgagtaagggacaaactggagggagagacagggggctctgggccaggatgagttgctggggggtggggttgcatcagagatccctggggcttttccaggctagagaggaagtgtgagtgaggttgggcagaggtgcaggaccccgaggagccaggaccaagaagactgggggatggacacagacatggcgggctaacttgccaagcccctaacctcagctagttctggctacagttgctcctcgctttgctccatctcaggcaggtacctactggggaaccagtgagggcaaggggcccctgggcagtaacctgaagagatccttgttttattaaatgcttgaatcccggtagatggtttctttgccaggtgtcctggattgggaagggaaatgcacactgcggggatctagataccgagagacagaggagaaaaggagggagggagaggaatgaaagacagaagctggcttccacgaccatctattcaacagcgaaaaactgccctacccctggattcctgaccccctttactctcttctgctttttctttttccccatagcattggtccccttcctatataacgtataacctgcataaggtacgtttagtatcttttttgtgtaatgtgtgtcttcctggttcgaatgcaagctctagacaggcagctgtctttatctggtttgttcatggctcattcctcagagcctggacctgtgtctaggtaggtgctcaacaaatatgtgttgaacaatgtgtgaggtcaggatagaaagtcagattggtagatggagaggggaaagaaaaaggagagcgaccgggcacggtggctcacgcctgtaatcccagcactttgggaggccaaggcaggtggagcacttgaggtcaggagttcaagactagcctagctgacatggtgaaaccccgtctctactaaaaacacaaaaattaggtgggcgtggtggtgcatgcctgtagtcccagctactcaggaggctgaggcaggagaatcgcttgaacccgggaggtggagtttgcaatgagccgagatcacgccactgcactccagcctaggcgacaaagcgactctgtctgggggaaaaaaaaatggagaggaaggaaggaggggaaggaaagataagggaagaaggaggaaggagaggaggagggagggaaagagagaaggagggggaggaagatcagaagaggaggaggagaatggaggagggagagagagagggaaggataggcaagagggggaggagagaagttggggagagagggcctagcagctgggacccccaaccgactcctgcgtaatagttctatggacaccactcagagtggccagtcctgggaggatgggttgaggagctccggggaggtgggaccttagaggaaaaagactccaggatcagcaaagaccccaagtctgtaaagagactgcctctggacttccaggaactcagaaccttggatgggctggagttagacgggaccttttctcccccacatgcctattctgggaaacccctaggcttccatgattctgccgaaatccagggagggagggagggagcctagccagcaatgatgactgtacatccaccttctgcctccagctagtgcctctgggagaaactgtaggacttccagagctgggaggagggagagaaaggcctggagggggagagccctgcctgtaacaagttgaaggcactttctaccccagcatgcaccatctctcctgccactttccctggagagaaacagagacagtaagagccagacagagggagagggagggaggggcttccttttgcaaaagctgtttatcctctccagggaagcaagagaggaggagacccattttccagatagggaaactgaggcacaagaagagtcatttcctgggacaagtgatacagcacacaggcagcatggctgggtaacagaaatcaggtggtaggcattaggtcactaggctatgccctgccagtcacagaggaaggaggagctgggggcttagactaagatctgagagcctggattcctgagtctgagggaggagcggctgggatctgaattccctggtctgaggaaggaggggctggacctggactcccgggactaagggaggaggggctggacctgaactcctggatctgagggaggagggcctgggacctggacttctgggtctgagggaggaggggctgggggcctagactctggggtctgagggagaaggggctggacctggactcctgggtctgagggaggagggggtgggggggctggcatccagtgggctcaagatgaggcctggacccctagattctcagctctactgcgttccgagctatcagggaatctgccccgatattcatgtaggttcttttctattttccttaagcgttggccagcttgagaaataaagggacagagtacaaaagagggaaattttaaagctgggtgtccgggggagacatcacatgtcggtaggttccgtgatgccccacaagccacaaaaaccagcaagtttttattagggattttcaaaaggggagggagcgtgcgaataggtgtgggtcacagaggtcacgtactttacaaggtaatagaatatcacaaggcaagtggaggcagggcgagatcacaggaccgcaggaccgaggcaaaattaaaattgctaatgaagtttcaggcaccattgtcattgataacatcttatcaggagacagggttttgagatcaactggtctgatcaaaatttattaggagggaatttgctcttccaaataagcctgggagcgagcgctatgggagactggagtctatttcacccctgcagtctcgaccataagagacaggagcacctgggggggatatttataagcctatacctccaggcgcgtattctctttcccagggatgttccatgctgagaaaaagaattcagcgatatttctcccatttgcttttgaaagaagagaaatatggctctgttctgcctggctcaccagcggtcagagtttaagattatctctcttattccctgaacaactgctgttatcccgttcttttttcaaggtgcccacatttcatattgctcaaacacacatgatctacaatttgtgcagttaatgcaattattacagggtcctgaggcgatatacatcctcctcagttgacaggattaagagattaaagtaaagacaggcataggaaatcacaagggtattgattggggaagtgataagtgtccatgaaatctttacaatttatgtttagagattgcagtaaaggcaggcataagaaattacaaaagtattaatttggggaactaataaatgtctatgaaatcttcgcaatctacgttcttctgccatggcttcagccggtccctccatttggggtccctggcttcccgcaacaccgagccctgacagaaaacttcccaagcccaggttcctcttgcacatgtggtttagctctgtgggttaccccctcctctctgtaagttcccattgtccaccttgcctcctgcatcggcctccaccacagtcagggcagaggagtctctgtaggacaaacacagcaatcagattcagaaaatagatccaaaggtggggatccagggcccagggctggtggcctggacctctggggctgccagggaggagtaggtttgaaagaaaaccctgggccaggcgtggtggctcacgcctgtaatcccagcactttgagaagccgaagcaggcggatcatgtgaggtcaggagttggaggccagcctggccaacatgatgaaatcccgcctctaccaaaaatacaaaaattagctgggtgtggtgctgggcgcctgtaatcccagctactcgggaggctgaggcaggagaatcgcttgaacccgggaggtggaggttggagtgagccaagattgcaccactgcactccagcctgggggacagagtgaaactgtgtctcgaaaaacatgaataaatgcaagaagaccctgtttctccactccacacttctgacaccaaagaggccgggctgcattcccaccaacaatcaattctccaactctctggacagcaactgcatgtgtaacaactcacttcagttctgacactaactccctggagttagcacagcccccacaggttgagggctcagtcccacgggagtgcccccgacttcacatgccagtcacaggcactgggaccacagggtacccacacttctatctgacttggctacaaatcaggggtcccacaaccccttcctgacattccataatttgctatcacagctcacagaactcaggggggtgctttacttccatgtaccagttcattataaagagtattataaaggttacaggtgagtggccagatgagggggaacataaggtgaggtccagaagggttccaagtgtgagagcttctgtctgcgatggcgtcatgtggacgtcttcatcaacctggaacttctcggaaccctattgtttagggtttttgtggatgttcctttacctgggcattgttaacagaaaaaccaaactctataaagtattttattgtatttatttttatttatttattaatttttggagtcaagatctcactctggagtgcagtggcacaatcatggctcactgcagcctcaaccttctgggctcaggtgatcctcccacctcagtttcttgagtagttggggctataggcgtgtgccaccacacctagctacttttttaattttttgtagagatggggtctccctaggttacccaggctggtctcaaacttctgggctcaagtgatcctcctgcctcagcttcccaaagtgctgggatttttggcgtgagccaccacacctggactctgtaaaatattttaaagaagtttattctgggacaatttcagtgaccgtggtgtgcccaaggttggccagattaagtttggtttgatgttgcagccataaaaaagaatgagttcatgtcttttgcagggacatggatgaagctggaagctatcattttcagcaaagtaacacaggaacagaaaacgaaacaccgcatgttctcactcatgcgatcatgagttgaacaatgagaacacatggacacagggaggggaacatcacacaccggagcctgtcaagggagggggtgtgggagataagggagggagagtattaggacaaatacctaatgcatgcagggcttaaaacctagacgatggtgcagcaaaccaccatggcacacatatacctatgtaacaaacctgcacattctgcccatgtatcccagaacttaaagtaaaaattgatttgatgcattttagggaggaaggagttacaggcaaagtcataaatcagtacatggaagacatacattggtttggcctgaaaaggcagaatatcttgaagaggggcgggctgacaggttacagatggattcagggcttctttaatttgcagttggttaaaggagtaaggtctgcttaaaacctggagtctgcaaaacctggagtctgcaaaaaagaatgttttaagataaggatgagggatgtagcaagattgatggcccttagaagtgacttaacacttgccttaggtcttgtatgtaatttggtatcttatcatcacaaagagtctgttttgtcaatcttacgacgtctattttaactataatgctggtcttctgtgttcctaaactccaaaagagaaggggcataagaaggcgtgtcccacctcccttgaagtcatggccaggaactcagtttttaggtttctctgggatccctttggctaagaaagggtcttgctgagtcagtggtggtgatggtgagtggggtggagggagggccttaggattttatttttattttatagcatgattgattaaatcattggccactggtgattagtcaatctccagcccctctcccttcttggaatttagagcatgaggctaaaaattccactgggatcacagggttcgtctctctggcaaccatccccgatccgcccagatcctcctcattagcataaactcaggtatggctggtaggggctaattatgaataacaaaatatgttcttctcacctcctcactcaggaagttacaagaattttaggagctctgtgctagaaattaggggcagaaaacaaatatatatttatttatttttagacaagtcttcactctgtggcccaggctggaatgcagtggtgcagtcactgttcactgcagcctcaacctcccaggctcaagcgatcctcccgccttagcctcctgagtagctggaaataaaggctgtgccactgtgcccagctaattttattattttttgtagagacaggagctcactatattgcccaggctcactatatattgcctatattgtctcaaactcctagtctcaagcaattctcccacctcgacctcccaaagcactggaattacagttgtaaaccacctcacctggcccaaatacatatttctttctttttattttttattttttgagacagagtcttgctgtgtcatcccggctggagtgcagtggcgcaatctcggctcactgcaacctccacctcccaggttcaagcgattctcctgcctcagcctcccgagtagccgggattacaggcgtgtgtcaccacacccagctaatttttgtacttttagtagagacggggtttcaccgtgttggccaggctggtctcgaactcctggcctcaagtgatccgcctgccttagcctcccaaagtgctgggattaaaggcatgagctactgcgcccggccccagatatatgtttcttattgtcttagtcccttctggctgctctatcaaaataccctaagctgggtggcttataaacaacaaaaattttatttctcacagttctgaggctggcaagtccaggacctgggtactgacagatttggtgtccggtgagagtggattttctgattcataaatggggtcttcttgctgtgtcctcacatggtggtgggggcagggtcctctctctcgggcttcttttgcaaaagcaccaattgcatgcatgagggctccaccctcataacctcatcacctcctaaacatgctcccttctaataacatctccttagggattaggatttcaacaatgaagtttaggggacccgaacacttattccctcaccgttagttgcctgttcttggcgtggagccatttcattcctctgagcctctcttttttcatctgtaaaatgggactgtctcaatttgtccttcataggatagccctgaagattaagagagagagtctgtctggcacattagaatatgaggtgagtttagccgttcctgaaacagcagagtttgaaggtctccaagactaactcaggtggcaacagggggatgcttccctggataccccaccccttcaccctccctggataccccacctctcctctgaggagtaagccaggttggagctgggaggagcccacactctgtcatcagacacccctgggttccaaggcaggcaggcttgcgcaagccaactcctggctctgagcctccttagccacctgcagacaaggaggacccttccccatgttgatgcaggtgagtggaactctgtttggttcctagtctttcaagcatggggtgaatagaccctcttacccgggacatagcagaaagctccaaacagtttggtgaacagccagactgtgcagcacagagagtgtgtcatcaaaggggcacgcctgtgggctccagatagaggacacagagctgcagaagtccggcggcccctttctgtgacctgggctgcaggcacccacagtccagaggctcaaaaccacaatgccgtcattcccagtgaatgctgtaagatgaagaggaaataacgctgccgtggtttcccatgaggggattacttaagaggatgtcctaacccccagaagctctgactgcaaccttatttggaaagaggggttttgcaaatgtcataaaactaagaatttcaagatgagcatatcctagatttaaggtcggccccaaacgccacggcaggtgtccttataagagtgaggcagagggaggtagacactaaacacagagaagaaggtgatgtaaagacggcggcagagattgcagtgatgcacccacaagccaagtgtattagttttctaagggttctgtagtaacaaaatacatctgtccctcagtgtccttggttccacatgtagtggggttgacgggtggcccccaaaagatacatctaagtcctaacctgcagaacctatggatgtgaccttatttggataaagggttttaagagcttttgcaggtgtcatgaagttaaggattttgatatgagatctggcttttcaacactgataccatcctggccaacacccttctggtccttgtgataatttccattttccaaatgttgagagataacacagagatgaaggaagctgccccaaagcacatgagacacggcctccgccatcagctcttgtcatcgtatgttcaagtgttctgcaaaactggtccgtggagcccaaagcatccacatcatctgtgtgcatttgctaaacatgacgactactggtcttcactgtcatttattcagattttgtgagctcagggctatggaaatgatttaaacaaatgtcccaggtaattcttacgtacagtttgagaaccatctgattaggaaaaaaaaaatgcctcccaaagtgaaataagaagactgaatgcctgtaatcccagcactttgggaggccgaggtgggagccccagggggttcgagagcagcctggcaacacagtgagaacttgtcactacaaaaaatttaaaaattagctggatgtggtggcatacgcttatagttccagttacatgaggggctgaagtgggaggatcacttgagcccaggagatcgaggctgcagtgagctatgattgtaccactgcactccagcctgggtgacagagggagaccctgtatcaaaaagaaaaagaaagtgatgcagagacataggtggagattggagtgatgtatcacaagctaagtgtactagttttctaagacttctgtaataaaaaagtacagctgtccctcagtattctctgaaggttgcttccaagaccctgcggatactaaaatgcacagatgagttcaagacacttacataagattgtgtggtatttgcgcataacctatgcacatcctcccatatactttatttttatttatttatttattattatttgtttgagttggagtcttgctctgtcacccaggctggagtgcagtggtgcaatctcagctctgccccctgggttcaagcgattctcctgcctcagtctcctgagaggctgggattacaggcaccctccactatgcctggctattttttgtatttttagtagagacggggttttgccatgttggccaggctggtctcgaactcctgacctcaagtgatctgcctgcctcggcctcccaaagtgctcccatatactttaaaccatctctagcttactgatgatacctaatacaatataaatgatagacagttcttctactgtatttttaaaatttgtattttttattacttttttcaaatattttctattcgtgattggttgaatccttacatgtagaaaccacaaatatgaagggccggctgtgacacaaactcaggggattaaacaacagaaatttactgtctcaaagttttgccagctagaagtccagaatcaggatgttccagcagacttggtttcttctgagggctgtgaggcagaatctattctatgcctcttgcctagattctggtgattttttttttctttctttgagacaggctctttctctgctgcccaagatggagtacagtcagctcactgcccactaacctctgagccagtgagctgacccagccccaatcagctctttgcaacttctgcctctcaggctttagccaacctcccatctcagcctcccaaatagctgggactacaggcacaggccaccatgctcagctatttaaaaaaattttttttgtagagatgaggtctcattacattgccaggctagccttgaacttctgggctcaagcaatcctcccccatcagcctcccaagtagctgggactataggtgggagacacctcacctggttagcttgttttttatttttattaatttatttatttttgagaggaagtctccctctgtagcccaggctggagtacagtggcgcaatctcagctcactgcaacctccgcctcctggattcaagcagttctcctgcctcagcctcctgagtagctgagattacaggcacgcgcggccacacccggctaatttttgtatttttagtagagacgggatttctccatgttgaccaggctgttctcgaactcctgacctctgttgatctgcctgtctcagtgtcccaaagtgctaggattacaggcataagccgcagcgccctgcctatttttattttttagacagggtcttggtctgtcacctgggctggagtacagtggtgtgattgtagcttaccacaactcagaactcctgggctcaagtgatcctcccgcctcagcctcccaagtagctaggaccataggtgtgcaccaccacaccctgctcactttttaatgttttgtaaggacagggtcttgctatgttgcccaggttggcctcaaactcctgggctcaagcaatcctcctacttcagcgtcccaaagtgcggagattacaggcatgagccactgcacttggctgcttctggtgcctgacactgacaatctttggtgatttgctgacagtctgtggtgttccttggcttgtggaagcatcactgcaacctctgccttcctcatcacatggcgttcttcccgtgtgcgcacctgcatccgaatttcccttttttcataaggacaccagtcatgttggattatgggtccaccctagtccagtatgacctcaccttaacttaaacaattacatctgccatgatccagtatccaaataaggacacgttctgaggggctgggggttaggacttcaacataggaatggagggtggggagaggacaaaattacatccctaacaccaaggaatgctaaggatggcagccgccactgggagctaggagagaggcgtggaagggattttcctccagagcctccaaaaggagccaaccctgccgccactttaatttcagacttctggcctccagtactgtgagataatccatttctgtggtttgaagccacttggtttgtggtaatgagttacagcaccctagcaaactaacatgccagcccagtgcggggtacatgtggagcgtaagatgaacaagctcctctctgtgccctggggaggctcacagggaccatgcatgctcttctaaggtgcacgtgatcagagcagatcactgagggagcgtttccgctcccctaaccccaggtgcagggacttcagagtaattcctactaaatgacccctaccactgttgcttgacaaagggaggtgcgagggggaaaaaagactatgagaatgggagagggcgggtaatacaggaagtgtcacgtcactctggttgcagaggacagagaaaacaaccctgtctccagcaggtggaaatggtcataatgttgatggtggccatgatatgtatgtttttatcttattatattttgagacagggtcttgctcttactccccagaatagagttcattggcatgatcatgactcactgcagcctcgacctcccaggcccagcctcgattctcctgcctcagcctcctgagtagctgggactacaggtgtgcgccaccaatcctggctgattttttttattttgtatttttttatttttgtagagactcggctttgccatgttgcccaggctggtctggaactcctgggctcaagtgatccgcctgctttggcctcaaatgttggggttacaggtgtgagccactgtgcctggccagccgtgatacagatgctcagctctatgcttcccatctcatgttcatgagctccaaccaaaagattccctcaggcagctattactgctcgcatgttaaagaagagaaaattgacattcgaagagggaagtgacttgtctgaggtcacacaagcagtgacagccgggatctgaacatgactgttacaggatccaaaatacatgtgctttctacactgtgaggtgctggtagatgtttaacaactggctctccaaggggaaaaatgtatgtctgtgtataaacacatatgtttataatacattttgtaattttactgattataaaggatatgtaccacacactttacaaagaataataatataatctaaaattctctttattgtaaatgccatacaattataacttcagggtgacttgctatttcttgcaaaatccagtactagtttttattttattttttgtttttatttttttgagctgtagtctcgctctgtcacccaggctggaatgcaatggtgcaatcttggctcactgcaacctctgcctcccaagtttaagtgattctcctgcctcagcctcctgagtagctgggattacaggcatgcgtcaccacgcccagctaatttttgtatttttagtagagatggggtttcaccatgttggccgggctggtcttaaactcctgacctcaggtaacctacctgcctcagcctcccaaagtgctgggattacaagcatgagccaccatgcccagcctgtttgcagattttttaaatgtctggtttaataaaggacagatgaactctcttttcttctgtatccaaaccattgcaataattttgttttttgttttttgtttttgtttgtttgttttgaggcagggtctcactctgtcacccaggctgggcaacatcgtgagatcccatctctgcaaataaataaataaataaataaataaataaattagttgggcatggtggcatgcacctgtagtcctaactacctgggaggctgaggtgggagtttgaagctgcagtgagctatgatcataccactgcactccagcctaggtgacagagcaagaccttgtctcaaaaaaaaaaaaaaaaaagtgagaatacagctttgggctaaacttaataagattaacatttatttatttatttaattttattattattattatttttgagacaaagtctctgtgtcgcccaatctcagctcactgcaacctccacctccctggttcaagtgattctcctgcctcagcctcccaagtagctgggactacaggtgcctaccaccacacccggctactttttgtatttccagtagagacagagttttgccatgttcgccaggctattctcgaactcctgacctcaggttatctgctcacctcagcctcccaaagtgctggggttacaggtgtgagccaccacgccagacccaagattaacatttaaaaggtagacttagtaacacagcttaccctctctattgtgggcgggccacgtccaatcttttgaaggcctgaataaaacaaaaaggctggcccttctacgaataaaaggaactcctttcctgtcaacctttaagctgagacatgagtttttttcttgcttttggacataaaataaaaacattagctctttctgggtctcaagcctgccagcctttggactggaactacatcattgtctctccttctcagcccttcagactaggactgggactgcaccaccagcattcctgggtctccagctctcttcaacgaaatcattttagtgtactgcctttttcttgaggggaccattactgatacagaaaaagtaattgaggccaggcacagtggctcacgcctataatcccagcactttgggaggccaaggcaggcagatcaccagaggtcaggagttcgagaccagcctgatcaacatggagaaaccctgtctctattaaaaatacaaaaattagccgggcgtgttgatgcgcacctgtaatcccagctactcgggaggctgaggcaggagaatcatttgaacctgggaggtggaggttacagtgagccaagattatgccattgcactccagcctgggcaacaagagtgaaactctatctcaaaaaaaaaaaaaaaaaaaaaaaaagagagagaaaaagtaattgattttccccagatcacagagcttataagagatgaggtccagattccaatccagtcaacttgttaggagggtctgtattcttaacgtctaaattctacaagagggattttttccccatagaggcaccattcagggtgagctggatattgttaggatttgggagccgacaggggctatcatttattctcgttctttgaccacatcataggccattgcctcttctctgtttgctggttcatgcaagaccaggagctcccccagtaagtggccggaagggtaatacccaccccccgcaagccaagtctctccccattctcttgctcagcctcagtcacgggaaccaccctgtggttgattcattctgacaattattataggtagcttaggaacggatggttgagttgtgagttgcagaaactcggtcaagctggcttaagttaaacctgctggaagaacacaagggaatttaaaggaagccaactgcagacagtgcgtctagaccttagaggaactggaacattatctggtagcttctccctaccccttgcaatctggggcttcatcatctctcacttcttctctgttcaaatcctctgctcagttctctctctgtgactctttctagcaaatgatccagccggagggtgttctggagattctgcaaattggcagaagcgagggtggtcttgtatgaagggtctgccctctaactttgtagcagggtcctattttactacactctccttctgggcctcaatttctccatgtgtcagcataggaagaactctctgacttaatggagttggtgaccaaaggggttccaggatttacaagtatcctgcgtaattataaaagaggtacagaagcaaaaggtttagttaaaccatcattcattgaagccttttgtatgcagggaaaaggcaaggatgacacgatgccctccagaagctctggggtcagtggcataggttaaataaatgcattggatgctgatgagtaaggcttgcagagcttcgtggggggtgtacagaaaaaatcatcatgggagtctagagaagagctagattcccaaggaccacatcatgtcatcaaaactcaggaatctccccttgcactgagatgaaattagccctcatcacccagcccctcacccaaagacaggttctgctgtaagttaattctggatgctccaagcttctccttcatctctcttctttctattcattctctctccatttctcttctgtttcttgtttataataaaatgatggccaggcgcagtggctcactcctgtaatcccagcactctgggaggctgaggcgggcagatctcctgaggtaaggagttcgagaccagcctgaccaacatggagaaactccatctctactaaaaaatacaaagtgagccaggtgtgatgcatgcctgtaatcccagctactctggaggctgaggcaggagaatcgcttgaacccagtaagtggaggttgcagtgagccgagattgtgccattgcactctagcctgggcaacaagagtgaaactctgtctcaaaaataaataaataaataaaataaaatacaataaaatgatgatgtctgtaatggtaattaaatgattattcaagagccgacaacagaaatcttcttgatggggtgtggtggctcacacctgtaatcccagcactttggaaggctgaggcgggtggatcacaagatcaggagttcaaaaccagcctggccaatatggcaaaaccccacctctactaaaaatacaaaaaaatttagccgggcgcagtggcgggcgcctgtagtcccagctaacctggaggctgaggcaggagaatcgcttgaacccgggaggcagaggttgcagtgagctgagatcgcaccactgcactccagactgggcgacagagtaagactctgtctcaaaaaaaaaaaaaaaaaaaagagctggcaccagaaatcttcttaaggaggatactgttattgataaatgacttgagttaggaaaggagacctgagggataaagagtcagagtcaagggtaggatggctaaatttctctgcgttgtaaaaaaaaaaaaaaaaaaaaaaaaaaaagcaggaatctggaggtgaggagataagagggagggtggacttttaaaaggatgtcttaagttcaactggaagctttcatgtttgtccgttgctggccagttgcatactctaacatttccaagcttctttctgtaaagtgtgtttcatatttaaataccttgtgcaggtagcttttcagtaaattgaaggaaatgtctgagttcctctctgggttaatttcatcagggcagcaaccaccagacattgtgtgaactggactaactcagttgaagcaagacttagagccacaggtaaaaacacgggccctgggggccctcccttgtggagaggataatctgtttcccaaaatttattatataaaagattaggcatcaggtagatctcaaggaaatgaggggtcttcagctgacatctcgataactttatatttttactgagttgttgaccgataaaggctgaggactttatataaagtatcttctttttttttttttctgagccggagtctctctctgtcacccaggctggagtgtagtggcgttttcttggctcactacaacctccgccttccaggttcaagcgattctcctgcctcggtctcctgagtagctgggattacgggagcctgccactacgcccagctaatttttgtatttttagtagagacagggtttcaccatgttggccaggctgttctcgaattcctgacccctggtgatccgcctgcctcggcctcccaaagtgctgggattacaggcatgagccaccgctcctgccctatataaagtatcttcttgtatatcttgtctgatttaagccatactctttcacacttctccctcctccttcatttacctaggatgactatataatttatttttcacagcagggcacttttcagaatggaagtggacactactcatcatgatgccagaatgatgggtatcattcactactcataattcaggactaataataatgggtattatttgggttcatttcaggcaaactaggatgcagatgacagcttcttcctatcatttcccaccctgaccacccaaggctgaggtccaaaatcaaaaaagaagtcaataataaactcatatctgtttattctccccaaatcaggggacacaaaggcttttttttttttttctgatgagtgggtaatcctaaaataagcaggaaatgcctgtggctcagcctaactcaaggtgagacgaagctggagctgggagctcgaaagtgtcccccagctccctcctcactttgcctgtaactccacctctgcagaaggtaaagtagaattggtagctgtgtcactggtttgggttgagtcctcggtcagggccctctccagactggcgggaagggcgtggatcagcctctcccggaagtcctggcccatgaagacatagagcatggggttgaggcagctgttgaagaaggccagggcacttgtcacatccactgcaataccaatttctttgtacatgccttgcaataactcacggattctgactgtggctataagggccaccacctgatatggggaccagcagagaaaaaaggctgctgcgacaaaggagaggacccgtaagggacgactggacttaatcaagccttgcttgtggatcttggtggcaataagcccataactgacagcaacgatggacatgggtgcgctgaagccaatgatgaaccggatgatgcctctcaccgtcaacatggcaacggccacatttatcctctctttagggtcgttggtccagggcgaaaagttaaaagtgcaggctactgtccccgttttaccaggtactgtagtcacacgaatgataactggcaatgtgaggagcagagccatcacccagggcccaatgatcaccttcttggccaggctcacggtgcggtggttctgggtccagactggatgcaggacgcaaacacagcggtccagagcaatgagggcgatcaggaagacacttccgaacaagttgatgtccactatggtaaagacgaatttgcacaggaaccagccgaaaggccaatgtcctcccatggccttcctgaccatgaagaatggcaaagtggaggtgaaacagaagtcagccacggccaggttcaggtaactgatggtggtgactgtgtgtgtcatccggaatccagccacccagatcacaagcccgttgcccaggaccccgaggacaaaggtgactgcaaataccagataagtgatgatatccaggaagagatagccagcagatacagcaggtgtccctccagagatgttcgtggggagagaggaatttgtctccatcttgtctgctcctgaaatagtgcagtcgtggtcattcctcagttatgaacctccgtaccatttccccaccccctcatttctgcccctgccagttttcccactcctagctttctcaccttcccctagagctcccacaacagccggaacatcctcaccactgtcccttacacatgcccacatctatacattggcaatcttttattgtacctgttgggcaagattacatctttttttttttttttgagatggaatattgctctgtcacccaggctggagtgcagtggcgtgatctctcactgcaacctccacctcccgggttcaagcaattcccctgcctcagcgtcctgagtagctgagactacaggtatgcaccaccccactcctggctaattttcgtatatttagtagaggtggggttttgccatgttggccaggctggtcttgaactgctgaccccaggtgatccacccacctcagcctcccaaagtgctgggattacagacgtgagctaccacgtgtggccaagattgcatcttatgacacatcctcataattgctaacatgcaagcccctaccagggagattaaatggctaaggaagatagggtccttgacctccaagaggagaatatggggccaaagatgtatagagaaaacatgtattcaaacaaaaatgttcatagagacactcctccctatagccaaaaggtagaaacaacccagatgtccatcaacagatgaatggataaacaaaatgtggtttatccacccaatggaatattattctgccataaaaaacaatgaagcactgatatatgctacaacgtggctgaaccttgaaaacattactctaaacaaaagagggctggatgtggtggttcacgcctgtcatctcagagctttgggaagccgaggtaggagggttgcttgagctcaggagttcatgatcagcctgagccacatagcaagatcctcatctctaacaacaacaacaacaaaattaaattaaattagctggatgtggtggcacacacctgtagtcctagctactcagaagggtgagatgggaggctcacttgagcccaggaattcaaggttaatagtgtactatgattgagccactgcactccagcctgggcaacaaagcaagaccctgtctctaaaatgaaagaaaaaagaaaggaaggaaagaaggaggaaggaaggagagaaggaaggaagacaccacaagtcacattttgtatgattccacttgtatgaaatatccagagtagccaaactcacagagaccgaatgcagattagtgattgccagggactggggaaactaggaagtggggaattgttgcttaatgaatatgcagtttttgcttggtgtgattaaaaagttctggaactagataatggttatggttgcaacacactgtagatgtacttaatgccattgaattgtacatttaaatgggtaacttttttattgttgtttgagacgcagtctcgttctgtcacccaggctggagtgcagtggtgcgatcttggctcactgcaacctccgcctcccgcgtttaagtgattctcctgcctcagcctcctgagtagctggaattacaggcacttgccaccatgcccagctaatttttatatttttgtagagatggggtttcaccatgttggccagcctggtctcaaactccttgacctcaggtgatctgcccgcctcggcgtcccaaagtgctgagattataggcgtgagccactgtgcccagcctaaaatggttaactttttgtattttaccatcaatttaataaaggaaaaataagagcataagatatcagaaaatcagtgggcgacagcttcagtgacctagtgtcacacaaacgtggactaagactttctctcacccataacactgcataagaactataaggtatgcaacttctcagccaggcgcagtggctcacgcctgtaatcccagtaccttgggaggccgaggcgggtggatcatgaggttagcagttcgagaccagcctggccaacatggagaagccccatctctactaaaaatacaaaaattagccaggcatggcggtgggtgcttttagtcccagctactccagaggctgaggcaggagaatcacttgaacgtgggaggcggaggttgcagtgagcagagactgcgccattgcactccagcctgggcgacagagcgagactccgtttcaaaaaaaaaaaaaagatatgcaacttctccactccaaattctgctcgctctctctctttaaggtcatgaaatctccctttcctctctcatcgtgggaagcaaggcatagtacttggttagttttccaacataggtcaaatggatccgtgagtgatactaaacgacgtataatcaagtattatatccaatggattctgtgctagaagaagtcagaacaacagactctgtttccactctcgtctctgcggttaccttggccagatggatgggaggtgcttctccatccattggatgggctcagcactcttggggatgtagaagaccgtgatagaaataatagtccaaatatgtattggatatgacatttcattagatcaggtatgcaaagtgcatgtcaggttcttgctgagagctggccttctctcttttttttaatttattttattttatttatttatttattttgagatggagtctctctctatcacccaggctggagtgcagtggcgtgatctgagctcactgcaacctccgcctcccaggttcaagcaattctcctgtctcagcctcctgagtagctgggatttcaggtgcacgccgccgtgcctggctaatttttctttttaattgtattttagtagacatggggtttcaccatgttgcccaggctggtctcaaactcttgagctcaggcagtccacctgcctcagcctcccaaagtgctaggattacaggtgtgagccactgcgcccggcctggtcttctcttctaatgcttgcagcagccttcctcaaaattgttactatgagggtcactgtctttatggtacccattttgcagacgaggaaagtgcgacttagagcatttcagttaattccttaaagtcacccaacagcccaggctgtcgaattccagcaaaagtctctttctgcctctgccctgccacgctactggcacagaagagctgtctaatgcactagtcactcaccacatgtggttttcaagcacttgaattgtggctagtccaactggagacaggctgtaggagtaaaatacccatcagatttcaaagacttagtatgaaaaaaatattgtgaccatctcattaatagtttttatattgactacatgttaaaatgataataatttggctatttaagtttaggttagatattttattaaaattaagttcgcatgtttctcttcacctttttaaagtgcctacttgacactttgaaattacatatgtgtctcacatttctaatgaactttgatactctacaatctcagaaacaactcagagatgtctccctcccctaccacccatccaaccaccaaaataccctgaggactctttgtcctcaagaatctctaaggcaaccagttcagaagattgttgcaatgaatgatgaggattctgcaataatgagctggaacataccagagaggaaaacctgtgcaattttgtccaattatggttcaagggaaaaatcctgtgatttgcaatgaacacaggccttggtggctgccatcgatgaaggactttatgcttgataatcattgtaccacatcctcaactttcttgcctctgatctcaacaaactcagcattgattatacatcatcatccctgtgtgacggaagaggaaactaggagcttgatgagaaatgacagccaatgtctgcagattcatgagagggcagggctgtattccgctactgggtcctatgcaccatgcagaaccagtgtcttcacgtggagactcatcactgatccgaaaggtgactgcttctgtattacactcatttccccatgacccatcataaagtcgttagggctcttttgctttctcctgaaagcttcaaaccaaacatcctttcccatcccgactcaagccctcaagctgatgcccttgcctcttgctccaccagattctcctcctgctggctcctgcatcactgttctctgccctcatctctgtaaccagaaaacaagtgtttccatccaagaattaccctctactggtcccataaaactcattcccccatttactcaagaacttccctccttcacttatcccttctctctcctgcagcctcatagtgtctctatattccatcattcccatcaggaccccaataaagtctagagcctatttgtttatttatttatttacttatttatttgagatggagtctcactctgtcacctaggctggagtacagtggtgcaatctgagctcactgcaacctccacctcccagattcaagcaattctcctgcctcagcctcccaagtagcttgaattacagacgcccaccaccacgcctggctaatttttgtatttttaatagaagtgaggtttcaacatgttggccaggctggtctcgaactcctgacctcaagttatccacctgccttggcctcccaaagtgctgggattacaagcatgagtcaccgtgcccggcctgtttagaacctctttaaaaaaattattcttcaactccacatccttcttcaaacaaagagtctattgtgttcaccagtgtattaagtgtgtctatgtcaagctacccagtcccccagaatatgtttcttacctggactgttcaccagctgtggtcttgctctgggtagttctaggtctgggtctcctggggagagtgactcaggctctaatgattgcagcaaaacatacaccaaggaacaggaggaggggtaaaggaactaaaaccagctgggtagcaggaaataggaagtctgagcttcttctgatttttgatggccccaagaatacaccaatatactgtctgctttaatggcattaggacagtgggctgggcctgtttagaaactcatgtacctgactgtatttctcagcctcagtctctgtgggatgcagaggttcagtgctctcaacaacaagggccaagaaatccaagtgtccgggcccctgctccctccaagggtcaaggtaaagaaagcagcaagcactgtggtgagaagaatcagagggaggcaatgaaaggaagagaagaagtcatgagggatggagaccagaaacacagagagaggtaagggagtgggggaagttgagacagttggcaggacagcgcgtccacacccatgcacaccaccaagattaaccccataatcctctgatcttgtggaagctcatttgtagtcttctagcccaaagaaataaccgtttttctgaaatgttaagcatccttccaagggtatcagagtgatatggagaaatatggtaagacagttacagaatcagagataacgacactgattctaaaagcattattaccaaggcattgttgcattaagactgttttttcttttcttttagagacagtatcctgctacgttgcccaggcatgtctcagacccctgggtttagtgatcctcctgcctcagcctccccaaatgctgggattacaggcatgagccgggctgtttttaattctaagtaatttataatttacaattacacctaacaatggcttcaacaaggggtgtccaatcttttgccttccctgggccacactggaagaagaagaattgtcttgggccacacataaaatacactaacactaacgatacctgatgagctaaaaaaaaaaaaaaaaaaaaaaatcccccaaaaatctgataatgttttaagaaagtttatgaatttgtgttgggctgcattcaaagccatcttaggccatgggctggacaagcttagcttagaaccaagacgaaatttatggtttactttacaagaattttgcaagagggtaatactaggttaggttatatctggaaaatatcatcaagaactacattcattttaatcttttctcttttttatccctaatatggtgactttttttcctggggattgccacttcatggctccaagaaagctaccacagctcctgacttcacattacagcaggggtccccaacctccaggccatagaccaatacacagaccgataccggtctgtggcctgttaggaagtgggctgcacagcaggtgactggcaggtgagcaagagaagcttcatctgtatttatagccactccccattgctggcattactgcctgagctctgcctcctgtcagattagtggcggcattagattctcataacagtgtgaaccctactgtgaactgtgcatgccagggatctgggttgtgtgctccttatgagaatctaatgcctgatgatctgtcactgtctcccatcactcccagatgggactgtctagttgcgggaaagcaagctcagggctcccacggattctacatcattgtgagttgtataattatttcattgtgtattacaatgtaataataataatagaaataaagtctacaataaatgcaatgtgcttaaatcatcctgaaaccatctaccccgccaccccatggagaaattgttttttatgaaactggtccctggtgccaaaaatgttggggactgctacactccagcatcccacaccaggaggatggggatgagatggagaatcactgaagatctttaatcagaagggtgatatgttcatttgtactttataaacatttgtgtttgtattttataaacattttcttgggatcataacaacagatgcattttagaagattcccaaggtatgaagggtaacaaatgaagacgtgcctaggagtcacatggaagccaacactttgtaaggggattaaaataaagggaatggcagaggacatcattatgcacagaggagaagggcccaaatgtcaagagaaaacaagagacaagggactccacagagagtaattgccagaaaaatttgtaggtcttttgaagtctgactgttcttcctaaaacgggggtcctgggacacccctacctgtttcccatgagccctcttttctaaaacataagtaggttttcttcctggctaccaaatggcctgtgattagcacactaggttgggcaaaaatagagccaagtgtgtgttccaaagtgactatggtgaagaaaaaagcgaaagtcttaaaatggacttccacttctgtgtttgcgtaaggctaaaagggaagatgtcttagggttgaccggaatgggagtattcctgcctatgctgcaaaagtccctgactcttctggtaactgaaacatgagaaatggcctcggcgagcagcacagcctcccagtaaagcactggactgaggtggtaaagccagattgcctggactagaatcccaggactactgttcactagctccggacaagccagctaatccaggggtctcaaacatttcccccaactttttttttttgagacagagtctcactgtgtcacccaggctggagtacggtggtgtgatcttggctcactgcagttttgcctcctaggttcaagtgattcccctgcctcagcctctccagtagctgggattacaggtgcccgccaccacgcctggctaatttttgtattttttaagtagagatatggttttgccacgttgaccaggctggtcttgaactcctgacctcaaacaatcacttgccttggcctcccaaagtgctgggattacaggacggaaccactgcactgggccacaaacatttcctatgaagagccagatggtcaatatatttcatttggcaggccatagggtctccatcacaactccttggctctgctgttgtagcctgaaaacagccacaagcaaagttgtaaatgaggagcatgactgtatgtcaataaaactttatttaaaacacgacaattggacttcatataagttttgcatggcacaaaatacccttcatttgattttctttagccggtaagaaatattaaagccattcttggctctcaggccatacaaaaacaagcggtggctagatttgacccctgatttaactgcactgggtcccagacacttcacctgtgaattgagagcaatgatacttacagaggtgttttctggagcagaacaaataagatcagtgatacaaagcacttggcatgaattccagtgcaataagtattatcaatatcttagtaattacataaacctctctatctgctgtttcacgttctctgcggtgaacccatccatgcttaaaacttgaaccacacctcagctaacattcaccagacccctgtctctagctcagacctgcccttgatgttcagacacatcattttgggttcctgtttcctttcaaactcatctgcagcctttgctctcctcaccttctcccacaactctgttaaggactaaattgtgtcacattccccttcaaattcttaggttgaagccctcaccccatgatatggtttggctgtgtcccaaccctgatctcatcttgaattgtagctcccataattcccacgtgttgtgggaggaaccaggtgggagatagttgtttcatggggacgatttcccccataatgttctcatggtagtgaatatgtctcacgagatctgacgattttatgaggggtttcccctttcacttggttctcattctcttttgcctgctgccatgtaagatgtccctttgttcttccttcgccttccgcaatgattgcgaggcctccccagccacatggaactgtgagtccattaaacctcttccctttataaattacccagtcttgggtatgtcattattagcagcatgagaattgaccaatacaccccagcatgtcagaatgtgactgtatttggggatacaacctttaaagaggtaattagctgaaactgaggtcattagggtgggccccaactcaatatgactgatatccttatgaaaagaggagatccagacacagacaggcatagagggaaaactgtgtgaaaacatgaggaggaggcggtatctgcaagccaaggagagaggactcaggaggaatcaaccctgctgacaccttgatcttaaacttccagctgataaaactgtgagaaaatatatttctattgttgtagccacccagccaatggtattttgttatggcagctctaacaaactaaacactctgcttcttttcattgactctcgtctcaatgacagcccccaaatccacgcagttaccttggtgcaacagttctgaagaaaatggccacaatattcttggacactccttccactgacaggaaggcaggcatattgtatcgcctctcccctggaacctgggtagggttgggactactttgaccaaagaacgtggtagaaatgacttccacgtagctttcaaggctaggtcaaaaaaggctaggaagcatcttctggttctcctgggacacgtgttctggaggaaggcagccattgtcctgggactttgattcctctgagaccaccatgctggaaaggctgcctgtaggcacttggtgcaataccagcctagttcagcatttgagtcattccaacccaggcatctgacatgtgaatgaaggagctctagatgactccaattcacagtcttctagtcaccccccagacctttgagttttgggtggcagagacaagcatctctgtgccttatcctaattcccaacccacataatccatgaacgtaatgaaatggttgttttacatgctatgatttgggtggttatacagcaattatgaattatgaatgtgggcttcataaagacccttcatgcttcctcattctccagagccatttggtctccaagctcagtctaccaagcctggaaatctctccctaaactacacctcctctctagcacactactccagcacaggcaattattcgacaagttcaccttgatctctggcaacttcttaccctttaagatctctgcctccaactgggagcattctcagagccatccctttgcagggggactctagagcaatgttttctggaagcacacacctgacaagtcactctcctgcttaaatagcttttaagcagaagaaattgtaagaaagaaatttttttttagaccaatatccttgatgaacattgctgcaaaaatcctcaataaaatactgacaaaccaaatccagcagcacatcaaaaagcttatccaccacgaccaagtgggcttcatccctgggatgcaaggctggttcaatatacgcaaatcaataaatgtaatccagcatataaacagaaccaaagacaaaaaccacatgattatctcaatagatgcagaaaaggcctttgacaaaattcaacaacccttcatgctaaaaactctcaataaattgggtattgatgggacgtatctcaaaataataagagctatctatgacaaacccacagccaatatcatactgaatgggcaaaaactagaagcattccctttgaaaactggcacaagacagggatgtcctctctcaccactcctattcaacatagtgttagaagttctggccagggcaattaggcaggagaaggaaataaagggtattcaattaggaaaagaggaagtcaaattgtccctgtctgcagatgacatgatggtatatctagaaaaccccattgtctcagcccaaaatctccttaagctgataagcaacttcagcaaagtctcaggatacaaaatcaatgtacaaaaatcacaagcattcttatacaccaataacagacaaacagagagccaaatcatgagtgaactctcattcacaattgcttcaaagagaataaaatacttaggaatccaacttacaagggacgtgaaggacctcttcaaggagaactacaaaccactgctcaatgaaataaaagaggacacaaacaaatggaagaacattccatgctcatgggtaggaagaatcaatatcgtgaaaatggccatactgcccaaggtaatttacagattcactgccatccccatcaagctaccaatgactttcttcacagaattggaaaaaactactttaaagttcatatggaaccaaaaaagagcccgcattgccaagtcaatcctaagccaaaagaacaaagctggaggcatcacgctacctgacttcaaactatactacaaggctacagtaaccaaaacagcatggtactggtaccaaaacagagatatagatcaatggaacagaacagagccctcagaaataacgccgcatatctacaactatctgatctttgacaaacctgagaaaaacaagcaatggggaaaggattccctatttaataaatggtgctgggaaaactggctagccatatgtagaaagctgaaactggatcccttccttacaccttatacaaaaattaattcaagatggattaaagacttaaatgttagacctaaaaccataaaaaccctagaagaaaacctaggcattaccattcaggacataggcatgggcaaggacttcatgtctaaaacaccaaaagcaatggcaacaaaagccaaaattgacaaatgggatctaattaaactaaagagcttctgcacagcaaaagaaactaccatcagagtgaacaggcaacctacaaaatgggaaaaagttttcacaacctactcatctgacaaacggctaatatccagaatctacaatgaactcaaacaaatttacaagaaaaaaacaaaaaactctatcaaaaagtgggcaaaggatatgaacagacacttctcaaaagaagacatttatgcagccaaaagacacatgaaaaaatgctcatcatcactggccatcagagaaatgcaaatcaaaaccacaatgagataccatctcacaccagttagaatggcaatcattaaaaagtcaggaaaaaacaggtgctggaaaggggagaaataggaacacttttacactgttggtgggactgtaaactagttcaaccattgtggaagtcagtgtggtgattcctcagggatctagaactagaaataccatttgacccagccatcccattactgggtatatacccaaaggactataaatcatgctgctgtaaagacacatgcacacgtatgtttattgcagcactattcacaatagcaaagacttggaaccaacccaaatgtccaacaatgatagactggattaagaaaatgtggcacatatacaccatggaatactatgcagccataaaaaatgatgagttcatgtcctttgtagggacatggatgaaattggaaatcatcattctcagtaaactatcacaaggacaaaaaaccaaacaccgcatgttctcactcatagatgggaattgaacaatgaggaaacatggacacaggaaggggaacatcacactctggggactgttgtggggtggggggaggggggagggatagcattgggagatatacctaatgctaaatgacgagttaatgggtgcagcacaccagcatggcacatgtatacatatgtaactaacctgcacattgtgcacatgtaccctaaaacttaaagtataataataaaaatatatatatatataagaaagaaattttaagaagaaattctaagttctttttacagcattcaagaccaaccaagaaattgcctctgccgccctctacatacttaatgcttattgctgtctgccttatcatctatgctctggtaaacaaaagtaacctgcttttttgtgacccctttcgtgggtatttttactcccctctgacaagaatgcattattttttctcctttatctgagtctttaagactcagcctacatgttccctcctccggatattgactctagatccgtgaatctgagttagtggttccttttagaggacctcacaaggagccaggcatctgtctatcactacgtgcccccaccctattgtaactaagcactgcattctcacctctctattcaggtggtccgcagagcccatgtctgattgatctctatgtctccagcagccagcaaggaagcacctctttagagacctgcacctatacaatacctaccaccttttatttctcgatatgtgaactccattgagaacaaacgagtaaatgtaggtaatgtgccttcttcttttcttttcttttctttttttttttagatggagtctcgctctgttgcccaggctggagtttagtggcacaatctcggctcactgtaacctccgcctcccaggttcaagcgattctgccgcctcagcctaccaagtagttgggattacaggtgcccaccaccacgcccagctaattttttttgtatttttagtagaggtggggtttcatgatgttggctaggatggttttcaactcctgacctcaagtgatccacccacctcggcctcccaaagtgctaggattacaggtgtgagccacagcgcccagccagtaatgtgccttcttaagttctgtgagccattctaacaaattatcagaacagaggaaggggttataaacatccccccacccccgatttatagccagtcagtcagaagtacaggtggccacctgggacttggattggtgtctgaagtgaggacagttttgggagagtgagccctttaacttgtgggatctgacactaactccaggtagacagcgtcggagctgaattgaattgtgagatacccagtggtgtccccagagaactggagaattgcttgatatggaaaagacccacacatttgatgccagaagtactgcataagtcgagaattgagtttgacttaatcatcatatttgggcttgattgcgtggctgaaactcttcccacttcagtaattgtttctttcattttcatgaaactctgaagaaggaagggctggacattcagattccttgacccttgacatttggaagcatgaactccagtctctcacagaaggctagaggtgaaggaacattcagacacattggtttctaagaagagtccgctgacaacatacccaaggtgtcttctgaaaattataagaaatcctgagtttctgttaggggattggctccagctccattgtccctcccccatcattcagtagtctccgcgaaagcccttagagccggtgttgctccacaggaagccaagaagcacacaggaaaaggagcttagctgctggtaagttggggactgacaatttaaaatttatcaatggaactcctgctctctgacaaacacctcctaaattctagagcagtgctgtaatggagcatccacttgccacaggtggcttttgagtgcctatgtttctatcttgatctgaaatgtgcttaagtgtaaaatatacttagtgtagtttaatcattagtatgatcaaaataatacaatttatctcgttaataactttcattttggtaacgtgttccaatgattttttttatttgcggggttaaatgaaacatattattataattaatttctcccaatgattttacttttttaacatggctactagaaagttgtaagtcacgtgtgtggctggcatttagggcttgcattaccctgtctctactaaaaatgcaaacaacaaactagccaggcgtagtggtgggagcctgtaatcccagctactcaggaggctgaggcaggagaatcgcttgaacctaggaggccgaggttgcagtgagccgatatcgtgccattgcactccagcctgggcaagaagagtgaaactctaactcaaagataaataaacatgtgaaggagccaagtgtgaggagcttaagaggaagagcatggtaggcagaaggaacagagaaggcagaagccccgagatgacaatgagctgcatgttcaaggaatcagagcccgttatgggtggagcccagtgtgtcccacgagagtgcagagatgaggtctgaggaatgcacagggcaggtccaggggtacttgagggaacttaagataaggataagttagaagtttggaagccattagaaggtgttgaaaatagcatcaccattttattggaccttttttttttttttttttgagacagaatcttgctctgtcgcccaggctgaagtgcagtggcgcagtctcggctcactgcaaactctgcctctcagggtcaagcgattctcctgcctcagcctcccaagtagctgggattacaggcacccgccatcacgcccagctaatttttgtgtttttttagtagagacggggtttcatcatgttgggcaggttggtcttgaactcctgacctcaggtgatccacccacctcagcctcccaaagtgctgggattacaggcatgagccactcccggcccttattggactttttttttttttttgagacagagttttgctcttgttgcccaggctggagtgcaatggcacgatctcagctcactgcaacctccgcctccctggttcaagcgattctcctgcgtcagcctcccgagcatctggaattacaggcacgtgccaccacgcccagctaattttgtatttttagtagagatggggtttcttcatgttggccaggttggtctcgaactcctgacctctggtgacccacctgcctcggcctcccaaagtgctgggattacaggtgtgagccactgcacctggcccttattgaactttttaaaagctcatttggtttccttctggagattggattgtagggcaggggaaagtaggaccaggaacaacctatttgcaaagttggcgcaaacattcctgcctgacaggaccatggacacaggttgtagagatagagatggctctggctgtgcattcagcagattctgtagatagaattaataggacttggatgggattgtggtgagagaaagtgaaatgaaagataagttctagtttggaagttttaacaactgaatgtttaaactcaaatagacacaaaatattggaagagtggcaggtttgggaggatgagacaatcaactgtttggttgagccacgttaggtttgaaatgtctacgggactcccgtggggagaggttatatcagactggagcaccagagagaggccaaggctgatagtttagatgaaaagagagcatgatattttaagccctgagactggataatatcacctatagaaagactatatagagataagagaggtggggaacaagtaaaagctgcgggacactcctaaatttagagtcaaatttagagcagaaaatactagcaaaggggactgaaaagcggtggccaattgagcttcaaatgcaagtgaaagtgtgttgtgtgtacatttatcatctcatggcacaggaaaaacgtgatttaaggagaaggaagcgatccaatgggaagaagagatccaatggatcctctatcacgaagatattgagataagaaccaatatggatttgcacccactgcatttgcagccttgaggtcataagcatcctcaggaaaatgcaccaggtcagtgctaaggactggagtcaatacagactggattcaggagaaaaagtgaggcagggaatcaaagggagcaaacacagaaaactccttccaaaatctggctgcaaattcttttcatagaaagaattctctcaggagaaatagggttaacaccagaaaggaatatagtccaagatctttttggttgttttttgttttgttttttggggtggtttttattttgtttttgtttagttttgttgttgtttgtttgtttgtttttgagacggagtcactgttgcccaggctggagtgcagtggtgcgatctcagctcactgcaacctccgccttccggtgttcaagaggtcttcctgcctcagcttcccaagtagctgggattgcaagcgcgtgccatcacgtccagctaatttttgtatttttagtagagatgaggtttcaccatgttggccagtctggtctcaaactcctggcctcaagtgatccacttgcctcagcttccctaaatgttgggattacaggtgtgagccacggcacctggccaaggatggtttctttttaaagggaggggatatgatttatgtaatgtttatgtaatagtgagaatgatctagtagaaataaaatcttgagggtttgtttttggcagaaaatggaaggacaaatgcagggggaaagtttgtgggaagatgagagggcatcctgggccaatgcagggagggaaattattggaaagaacaagaagtctttattcacagtgacagaggcaggtagactgagggtcaggggaggaccggctgaaaatttcacatctagttattaccattttctcattataatgtcagtcaagggcatctgctgagagtgggaaaaacagagtaaatgaggtactttttggagaaagcaggactgaaataattaaggtgtgggatagcgagtgcgctggagaagtagagtaacctaatgaggaactgctgagttttcatttgaaatctgtggtcataaattcaattgcaaccctcgataattgtgaaagtcacttccgctctctgagccgtactttcctacctgttacacaaggacagcacttgtcccaaagcaagggtattgtaatcagagatgataaaatatatagtgactggcacatattaaggactcaccaaatagcagacctcataatcagtacaggtatcatctgtggttcgcagttctcctccttacattacaactagggtggacccaaaactttgcaatttttgccttgttaatttgtcctcacctgtcattgcacaatcatccttccttgttgcatcaacatttttttttttctgagacagagtctcgctctttcacccaggctggagtgctgtggcacgatcttggctcactgcaacctctgcctcccagactcaagtgattctcctgcctcagcctcccaagtaactgggattacaggcacccaccaccatgcccagctaatttttgtatttttagtagagacagggtttcaccatgttggccaggctggtttcaaattcctggcctcaagtgatccacctgtcttggcctcccaaagtgctaggattacaggcgtgagccactgcgcccagcctgtatcaacattttaaaatgaatttgaaattatggatagatcatgtcttctaagtgtcttgtagaatgtttggagtgtggatagagaaaatctgagtctgttgaggaactatggggtggaaaagggttaacagcacaattctgttgtaatcaatctggctgagctccaattctgtctctactctttctacctggtaacgttgaacaattaacgcagcccatctaagtcttaacttcctcatctgtacaatggttatactaattatcaggctgctgcaaaagtacttgtggtttttgatattattttcaatggcaaaaacagcgttacttttgcaccaacctaatatcactaagattaatcaatattcactgtgtctcaggagtgctcagtgttcacacatattaacacagcccatccacagatcctgtgagaggcgttgatagggttaaaggaaaagctcttggtgtgtgggtaatgttcataagtagaaacaactattgctatgagcatcgttcttgtcctgaccttgaacttcataatggattgagccccacgacacagcacacagcctggtgagggccaagagttcccatttgtcatagatatactcagtctagcctaaaagatttccacatctattctcacttaatcctcacctgaaagttagacttcaccataaaattgtcctcgttctgcagagcagaaaactgaggctcaaagagatatcactgactaaaaactcatagtgaggagacatcacagatgagattagaagagagatgtagctgacttcagagcccagtatatatatatattttagacagagtctcgctctgtcccccaggctggagtgcagtggcacggctcactgcaacctccgcctcccgggttcaagcgattctcctgcctcagcctcccgagtagctgggactgcaagtgcatgccaccaggcccggctaattttttgtattttcggtagagacggggcttcaccgtattgcccagggtggtctggaactcctgacctcaggcaatccaccccccttggcctcccaaagtgttgggattacaggcgtgagccaccgtatctggctgagcccagtattctttgtaacagtgactctcaattgggggtgactttgcctccgaggggacctttgacaatgtttatggaacctgttgattgtcatttctggagaaggagttgctactggtgtctgtggatagaggccaggggggctgctcaacatcctactgtgtccagaacagtctgccacaacgaagaattacccagacccagatgtcaaaggtgccaaggttgagaaaccctgagctacattaaataacgtcccatggaatacctcagtgaaactcactggtaatagcaggaagaaaaggaggaaataaggaaaaggaagaaggctaaaaatcaccagactgaggcatagccctatcctagtaatcttgggggaatccctttcaaaggcaggacttccgtatgcaaaggcagtggctctggagttgttcatctcggtttccgtatcttgctgcctccactgactggctgggcatgatgttgaaaaaaactacagaagtccccgggccatgaattcccccagatgtgatggctgtttcccaatgttattatgagcattagatgtgaacaagtgctatggaattgctatttctcttaaagatgctgaatagcccagtctgagatgattctcaaattctcatggccatagcaaatcatcctggcttttacacatacagattctagaatgagatttatggatataattgtttttcatttttattataagttcaggggtatatgtgcaggtttgttatacaggtaaacttgtatcctggtgttttcttgtacagattatttcatcactgagatattaagcctaatacccactacttatttttcctgatcctgtccctcccctcaccctccaccttccggtaggccccagtgttcccctctttgtgtccatgtgttctcatcatttacctcccatttgtaaatgagaacatgtggtatttggttttctgttcctgcattagtttgctaaggataatgaatacaattttaacaggcagcctggatgtttctgataaagtccacagaccacggcataagaaaatgtgctcaggtgacgtgggactttgtgttgaactggatacaaatattacagatgtgatccggaccagaggcagggactacatgttttgggtttttgttcttaaaagaaaaaaacaaaaacaaaaaaacttgatctgagaagctctgaagggtcatattcttacaatgttattgtccacaatttagtcacgtgtccactaccaaagcaatcccttgcaaagtaaaagggattctggttagtgctaattagactagtcaggatttactcccaacatggagaaaagacaccttctctgcagggtgagtaactaaacacaattgtggtttttcaagcagagaagaatggggaaccgttgctgggtgggcaaccagcaatatctgtcaagcgtaagggtttagaagtcagaccatgccaaactgaagtcctgaatctattatctactacctaagtgaccttcaacacatttcacaattgccctgagctttcatttattctaatgaaaactagaagtaatgaatattacatagctattacataggccaaaccggatcccatatgtagtaattaacacaatgcatagtctctaataagaacttcacaagtattaatacaacttattattcttatagtctttatcccacagacaccaaagctatacaaatcggcactgattatttgcattccaaacagagaagagctccacatcaagcagggacagggaaaagcagagggtagaaagcagagatggaactctctttgctgacttcctctagtgcagaatcctcaggatataacatactactacatgttaccagtgactcctcaaaattctcttcaacaataacctcaagccaaaccctcaaactttatcttgagtactagccaagcaataggtcaagggttctcacagtttgagggacaggagttgggagactggaagaacctggggctgaaagagattgcagagcttgccagcatgtttgcattgaatggtgggagacacagatgtgagccttctgattctgagtcatgtgccttcctcacaatgctgaggctgcctatgctcaattttccattgtccatacaacataagttcagtatgagccttgtaatcctcttggtgaagtgatcagcccgataagcgaaatgcatattgataatgatgggaatatggaggactatcccttcccaaaggagcatccaagagaatgccaattctatagcaccgttgtcaacaaggcttggtagatagagtgggtctcctggtaggagtgggagctttagtggaagttgatgtgagctataaatacagatgctgtaagatggttccacagctgagaaatggccattgttggaatgtttcaggtgctgctggcaagatggaaaccaacttctccactcctctgaatgaatatgaagaagtgtcctatgagtctgctggctacactgttctgcggatcctcccattggtggtgcttggggtcacctttgtcctcggggtcctgggcaatgggcttgtgatctgggtggctggattccggatgacacgcacagtcaccaccatctgttacctgaacctggccctggctgacttttctttcacggccacattaccattcctcattgtctccatggccatgggagaaaaatggccttttggctggttcctgtgtaagttaattcacatcgtggtggacatcaacctctttggaagtgtcttcttgattggtttcattgcactggaccgctgcatttgtgtcctgcatccagtctgggcccagaaccaccgcactgtgagtctggccatgaaggtgatcgtcggaccttggattcttgctctagtccttaccttgccagttttcctctttttgactacagtaactattccaaatggggacacatactgtactttcaactttgcatcctggggtggcacccctgaggagaggctgaaggtggccattaccatgctgacagccagagggattatccggtttgtcattggctttagcttgccgatgtccattgttgccatctgctatgggctcattgcagccaagatccacaaaaagggcatgattaaatccagccgtcccttacgggtcctcactgctgtggtggcttctttcttcatctgttggtttccctttcaactggttgcccttctgggcaccgtctggctcaaagagatgttgttctatggcaagtacaaaatcattgacatcctggttaacccaacgagctccctggccttcttcaacagctgcctcaaccccatgctttacgtctttgtgggccaagacttccgagagagactgatccactccctgcccaccagtctggagagggccctgtctgaggactcagccccaactaatgacacggctgccaattctgcttcacctcctgcagagactgagttacaggcaatgtgaggatggggtcagggatattttgagttctgttcatcctaccctaatgccagttccagcttcatctacccttgagtcatattgaggcattcaaggatgcacagctcaagtatttattcaggaaaaatgcttttgtgtccctgatttggggctaagaaatagacagtcaggctactaaaatattagtgttattttttgttttttgacttctgcctataccctggggtaagtggagttgggaaatacaagaagagaaagaccagtggggatttgtaagacttagatgagatagcgcataataaggggaagactttaaagtataaagtaaaatgtttgctgtaggttttttatagctattaaaaaaaatcagattatggaagttttcttctatttttagtttgctaagagttttctgtttctttttcttacatcatgagtggactttgcattttatcaaatgcattttctacatgtattaagatggtcatattattcttcttcttttatgtaaatcattataaataatgttcattaagttctgaatgttaaactactcttgaattcctggaataaaccacacttagtcctgatgtactttaaatatttatatctcacaggagttggttagaatttctgtgtttatgtttatatactgttatttcactttttctactatccttgctaagttttcatagaaaataaggaacaaagagaaacttgtaatggtctctgaaaaggaattgagaagtaattcctctgattctgttttctggtgttatatctttattaaatattcagaaaaattcaccagtgaagccaacttggtcttgtgttttctttctgggaagatttttaataacaagtttgttttctttaacagtgattagactcttctgttttttggttttttgttttttcctatctgtcagttttggtaaactgaatttcaaggagtttggccatttcattcaaactgtcaaactcatcggcataaaatagtataataactgtttaaaagttataaaacagcatgaaacttggctgggtgcggtggctcatgcctgtaatccaagcactttgggaggccaagaagggtggatcacctgaggtcaggagtttgagaccagcctggccaacatggtaaaaccccatctctacttaaaatacaaaaattagctgggcatggtggtgcacacctgtaatcccagctacttaggaggctgaggcaggagaattgcttgaacccgggaggtggaggttgcagtgagccaagactgtgccattgcactccagcctaggggacaagagtgagactttgtctgaaaaaaaaaaagtatgaaacttgaaatgctttcttttatgtatttattaatttctgatttttgttcttcttgttgttattatcctagagcacagcctttggagatacagtttcttttaaacaacgaaaatgtaagctctctgaagtcagggattttggtctgtatggtttgctgattgaaccccatcctctatgtgtaaaatactgtctgatatgtaatagacattcattaaatactcattgaataaatgaatcaataaacaatagtatcacctaggtgtcaagtgagaagttttaatgtcaaatcaaaattatctccaacccttattacatgaaccagaccatgtccagtaaacacccatcctcaagcacacaatatttagaaatactcatgtggcttactttttcatcaatttctggttttgagcttctgctttaaggaaagtaccatggctaactgttgcctcacgcctttgttttgaaataaatcaacccacaaaggtactcagccctttactttgcttacaggaaatgaccactcagaaatggtccttcggtgcggaacatactttccggatgcactggcaaaagacagaactctacacgaatatgaggcagtcctgttatcagcgtcctcactcactccaccgcttctccctttccctcctgtttcccctaaagttatttacatttccaacatttccaaaacagagaagtttacttagttcatttgcattcttgactcctataaatgctttccagttcctaagaaaagtataccctttaatgcccgactaagttgtggccatagaaaataaggaacaaagagaaaacgcaagaaggagaaacctggagccaagaacagcatatgaccttgaaacaggagaaccacggcttctagactggctagttaacagccttcctccactgccaggacagaggagtcttactttccttcccactggccttggttaattgcactggaacagtgcctgctgcatcctccccatttttcttttcttcattggaagttgccattgtggattctcagttccaattgcacccttgtgtactggggtcttcagaagctgaggattcttggtgtttatgggacattcaccaccaataaacatttctagacttgctcgaatctggaagtccaaaataaaactctggggatagtgtccatgggaagaacaggaccactttttctgtttggggagaagagtgtagagactgttgagtacccaaaggcgtaagctcccctggagactgccagctgcctacccaatattcttccccctactttattaacaaatgtgggcagcaattcattcagctaaaataatccttttctcagtcatccttccagctaggtgtgggtaaattctaggcagtaagatacaaaaatagtatcacattagtacataaggggctgcctcattattttattaacatagtgtttattgattgattgattgattgattgagacaggttttcactctgtcacccaggctggagtgcagtggcactaatcacggctcattgcagccttgacttcccaggcttaggtggttctcccacctcagcctcttgagtagctgagactgcaggcttgtgccatcatgcccagctaatttttgtattttttgtaaagacagggtttcaccaagttgcccaggctggtcttgaactcctgagctcaagcaatgctcctgccttaccctcctaaagtgctgggattataggcatgagccactgtacgtggcctagagtttattttttagggcaattttagattcatagcaaattgggaagaaaatacagagatttcccataaacccactgcccctacacatgcacaacccctctcattatcaacatccccgaccacagtaatatatttcttacagttgatagacctacgcagatacatcattaatccaaagcccacagtttacattagggttcattcttggtgttttactttcagcgggtgatatggttaggctttgtgtccccacccagatctcaccttgaattgtaatccccataatccccacgtgtcaagggagacaccaggtggcggtaattgaatcacgggggcagttccatgatggtcttgtggtagtgagtgagttctcatgagatcttgatggtttcataagcggctcttcccccttcactgggcacttctccttcctgctgtcttgtgaagaaggtggcttgtttccccttccccttctgccatgattgtaaaagtttcccgtggcttccccagccatgctgaactctgagtcaattaaacctctttcctttataaattacccagtctcaggcagttctttacagcagtatgaaaacagactgtccaggtacggtggctcatgcctgtaatcccagcactttggggggccgagatgggcggatcacaaagtcaggagatcgagaccatcctggctaacacggtgaaaccccgtctctactaaaaatacaaaaaatgagccgggcgtggtggcgggcacctgtagtcccagctactcgggaggctgaggcaggaaaatggcgcgaacccgggaggcggagcttgcagtgagccgagatcgcgccactgcactccagcctgggcgacagtgggagactccatctcaaaaaaaaaagaaaaaagaaaacagactaatacagtgggtttggacaaaagtataatgacttgtattcaccattacagtatcatacagactcgtttcattgccctaaaaattttctatgccctgcctattcacccctacctcctccctatcccctggaaaccactgatattttcattgtctttatagttttttcctgttccaggatgtcatatagtagaaatcatgaagtatgtagccttttacgattggcatctgtcatttagtaggatgcatttaaagtttcctccatgtcttttcatagactgatagctcattactttttagcattgaataatgtccactgtctggatgtaccatcatttatttatccattcacctactgaaaaacatcttggttgcttcccaattggacaattataaataaagctgctataaacatccatgtgcaggtttttgtgtggacagaagtttataacttgtttggataaataccaaagaacatgattgctggattgtatggtaagcatatgtttagttgcatgggaaactgccaaactctcttccaaggtggctgtatcattttgcattcccaccaataatgaatgaggatgttccatgtctttgccagcatttggttgtgtcagtgttctggattttggccatttctaataggtgtagggtggtatctcactgttttaacttgcatttccctgatgatatatgatgtgtatcaccctctcatatgttaacctggcatctgtatatcttctttcttgaggtgcctgttaagggcttggcccatttttaaaatgggctttctgtgtccttattgttgagttttaggagttctttgaatattttggataacagtcctttatctgatatgtctcctgcaacactctcccatagagcagattttttttttttttagatttttttttttttgagacagagtctcactctgtcacccacactggagtgcagtggcaccatcacagctcacagcagcctcaacctcacggactcaagtgatccccccacttcatcctcccaagtagctaggactgcaggtatgcaccactatgcccagctaatcatttattttctgtagaaatgggggtctcactttgttgcctaggctggtctcaaattcctgggctcaagtgatcctcccacctcagcctcccaaagtgctgggattacaggtgtgagccaccatgcccagccagaaattttcaattttaataagaattgccttcttgattctttctttcacggattatatcttttgttttgtaattacaaagtcattgtcaaaccaaacgtcatctagattttctcctatgttatcttctaggtgttttatagttttgtcttttacatttaggtctgcgatccattttaagttaattttagcaaagcatgtaaggtctgtttctaaagttacttttttgcacatggatgtctagtcattccagaaccatttgttgaaaagactatcttttctccattgaattgcctttgctcctttgataaagatcacttgacaatattaatgtgagtctatttctgggctctcttattcagttccattgatctatttgtctgttcttttgcctgtagtacactgtcttggttactgtagctttacagtatgtcttgaaatcagatggtgtcagtcctccaactttgctcttcttgttcaatattatgttggctatactgggtcttttccctgtccatgtaaactttagaatcagtttgttatatccacagaataaattgctggaatttttattgggattgtactgaatccaaagatcaaattgaggaaaactgacatcttgacaatcttgaatcttcctagccctgtacatggactatctctcaatttcttcagttcttctataatttctttcatcagagtgttgtagtttttctcatatagatcttgtacatattttgttagatttttactcagtgtttcatttctgagggacataatgtaaatagtattgtgtttttaatttcaaattccatttgctcactgttggtatctaggaaagtgattgatttttttgtactctgcaaccctgctataatcacttattacttccaggaatgtttgttatccaatcttttggattttctgcatagatgatcatgtcagttgtgaacaaaatagtttttttttcttcctttccaatatgcatacctttttagtttgtttttaattgaattagctaagacttcagcaatgctgaaaaccaatatgagagaagacgtccttgccttgttcctggccttactgggaaagcgtcaagtttcccactgttaagtataatgttagctgtaggattttttgtaggcattgtttatcagattgaggaagttcctctttattcccaggttactgagcatttttaaaaattatgaatgagtgttgaattttgtcaaatactttttctgcttctactgatataactatgtggttttttcattagtctgttgatgtaattgattacattaattaatttttgaaatttgaactagacttgcatacctggcatgaataatttttatactttgttttatacattacattatagtagtttagacatttttgggtttgatttcctaatatgtttttgagaatttttgcatctatgttcatgagagttattggtctgtagttttgttttcttgtaatgtctttaaatggatttggttattagggtgatcgtggatttatcatgagttagaaagtcctccttctgtgtctgtattctcaaagttcctcattctttttaatttttgcattgtattttattggatgaatgtaacaaaatttaatctgaccaaattgcttttgatcttttgctcattacaaaaaaaaagctacaatgaatacctgtgcacacacacattcctttgcatgactgtgtgtttgtctatagaaaaaaattacaatagtttgtaacctaagtgtctatcaacagatgaatgaacaaaaaaaaattgttcatatacataatggagtactattctgccatgaaaaataatgagactctgtcatttgcaacaacatggatggaactggaggtcattatgttaagtgaaatggatcaggcacagaaagacaaactttgtatgttctcacttatttgtgggagctaaaaatcaaaacaattgaactcatggagatagagaatagaaggatggttaccagaaattgggaagggtggcaggagtcgggggagaagtggggatggttaatgcgtacaaaaagaacagaaagaatgaatgaaacctagtattcaaaggcacaatagagtgaatatagtcaatgataagttaattatatattttttaaaaactaaaagagtataactggattctttataatccaaaggacgaatatttgagggaatggatactctattttctatgatgtgattattacacattgcatgcctgatatcaaagtatctcatgtaccccataaatatatacaactactatgtactatgtaccgacaaaaattaaaaattaaaaaaagtaatactaaaaaagatcgtttgtaatttagttgatttctctgctcttatctactatcagagctataaagcccattgccacatcttaggaagacaacttttctgaaaaacaaatagtgatctatttcttgacatgagtgggagtacatgagcattttgttttacacaaatatattaatcttcacgtttatctttttctcattgtgtgtgtttgtgtgtggggtggttgttatagtccacattttaaaagctaagagaaataagtcagctggatgtagcggctcatgcctgtaaccccaccactttgggaggccgaggtgggcgaattgcttgggcccaggagttcgagaccagcctgggaaacatagtgagacctcgtctctactgaaaatacaaaaattacctgggcttggtggtgcgtgcctgtagatccagctgaaggactggggctgaggtgggaggatagcttgagcccgggaggcgaaggcggcagtgagctatgattgtggcactgcactccagcctgggtgacacagcgagaccttgtttcaaataaaagaggaaaaaacgaaaaataagtcaatcgaattcgggtccccttttctttataccagtaaagcttcatagctcctgaaattaggctgcttgaagcaggacacctttcatataggtgctgcaattctctaaattcatacttgctaggacagggagggtcaaaggcagcaggaggaagccatccccggcatgactggctcgggtctcctgggctcgtgaaaacgaactcattagacatcgagctccctcttgtggcagctaaaagaaaacacaaggaaatgcaactcttgcttcactcagttctgtgaccgcattgggagataacccttggaaagcttgattatttgtgggctagctcgcccagaatacatttctaagcacatctgtacaagtaactttgttctttcaatgcagaaagtccccttcattccaaaatgtacattccagagacggtggaggctagagatctctcctgtatctcatcccattctatgagttaccagtgccattagacgaaagaaagtccatgtaaatgcttaggatgctggcgactgttcaactgtgattccattctatctttccatctcatgcctcctgcggctccaaacaccatctagttaactgcgtcccgaatgttgacctacactgatgctgtttcatcagagtcaattggggaggtgtttgtttgtttgtttgtttgttttaatatgggttaggtcactgcaacatcaaagcatcttgatttataaagtttggagcagagcacaataatctgtgtttaatcacagattaactttgttccctttaggtattccctggtaaattgtaatgtgcaatcagattcccctgttttctttttttgttttgttttgtttttgagtcagggtcttgctctatggtcaaggctggagtgcagtggtgcaatcatagctcactgaagcctcaacctcaccagctcaagcgatcatcccacctctgtctcccgagtaggtgggaccacaggaacatgccaccacacggggcttatttctgtgtgagccactgcgcccagcaatgattcccctgctttctagcagttgaataaatactcttttaactagaggacataataagaactaatattagaccatgagaattagaactaatattacctcttggaaacacggatatatctttatggtccacaccatagaacaaatggtcttttttatatgcggtggtaacacagccattgggagggaaacatggggagaagtcctagttaggaaagcaaatttggagagtgaggctgtgatcgtgaaatcacaggtgtggacaagctaagctgtcaatactttgttcttctgaaagaagaggttctcagcaacagtgaacagaattaataatttatcagaaaaaagtcccccatgccctttacacctcaattcttaccacaaatagcaaaccaactaaatctggatctgatttttgtatgtacacacaaagcacataacagttactgagaaacacagtgaaagaggaaggacaacctctgatacaaaaagagccaatatcgcctccaaaaactatgtcccttactctccctccctcaggtcctaacactaacttcctgtcccaatttgtagggaagtaggtgctcaatggttcctcttgcccagtgtgttctcttccagttgaaatggcaatctaggcataaagtttggaagatagagtcaaagaattaactactaatgatggagattttgtgagacccacacagagttgggaggcttgctggttgataaaactcctggcaattcataatgtttcacctattctaagtcacacttgagctaatattataccaggttgtccctgtgttagttatctattgctgcaggcaaatcaccctcaaaacatggcttaaaacaatagtaatctaatttactatctgttacaatttctctgggtcaggaatttggaagtttctggcttgagtgtttctggattgaaatctctcatgagtttgtagtcagatgtgagctgaggctgcaattatctgaaggcttgactgaggctagaaaattcacttccaggtgacataatcccatagataatgagttgttgctggaaagttgcttcctcaccacagaactgctggagtagtctcataacgtggctgatggtatctcccaggatgagtgatctgagggggaaagcgttaaatggaagtttcattctttttatgaactacacttggaagggatatagcattacttctgccatactccattggtcagggcagtcacaagtcctggtccagattgaagaggagggggaaaaaatcctcacttctctgtggaaggagtgggaggagtgtgaattacctgtacagacaacatgtgggatgagataaatatgtaacatagatatcagtggaaaatatagtctgccactgtctctagagatcattctagatagtcaaatcacggtaaacattttaccagtcacgatgggtatctagactatgggaataggaatgtaatttcaagcccagttttaagaaagggcaagattttaaaaatttatataggttatgctgttgtacatcaagtacaatttcttcccagttggcacctcctatcccgttcttgttacagtcaaaaaaccataagaggaagtagatacattcagagaaatctagtttctatccttgatcattctaacatgtttcctgcttctacagtttcagtggcaggaacagaagctgttcctgggatcagcaacatggactttgacttgccaaggccaatctggctacactcactgctgagtgcccaatctgcccacagcagagatggacactgagtccctgatatggcaccattccctgggtaatcacccagctccccagtggcaggttgaacacactggaccacttcccttgtgggagaagcagagcctcgtttttatcgggatagatgttaactctgaacatgaatgtgctttctctgtacataatgcttctgccaaaactatcatctgtggacttacagaatgccttgtccatcatcatggcattccatacagcattggtttgattgtgggattaaattcacagcaaataaactgtggcaatgggtccacactctggaattcactggtcctaccatattgtccattttgagtagccggcttgaaggaatggtaggatgaccttttgaagacttacccaagtaccagctagcaggcaataccttgcagggctggagcaatatcctttaggaagctatacatactctaaatcagcactcagtgtatggtgctctctctcccataactagaatccaaggatccaggaatgaaggggtagaaatgggaattgtatcactcattattacctttagtgatccactagaaaaatttctgcttcccatcctcatgaccttatgctgtgttggctcagaggtcttggttccaaaggaagaaatgtatccacccagcgacacaacaatgtttctactgaactggaaggtaccactgcccatcactactttgggctcctcttgctctgaatcagcaggcaaagaagggagttactgtatggatggggtgactgatcctggctactaagaaggaaattggtatgctactatattatatagagataatgaagaacatgtctggaatatgacagacccattagggcagctctgagtaccaccttgttttgttattaaagtccatgtaaaaccacagctctatcaagcaggactgtaatgccccagatctttcaggaatgaaggtttgggtttccccactaggcacagatgatgaccaactgaggtactagttgagggaaaatggaaaatggattgaggagtgaaagatggtagttataaatactaccatgatcgcagaatcagttacagaagtgaagactatcattttaatgaatatttcttattttgtcatgaacaaatttgtgtgtttcaaaaatttttgttttctttcctcttttgtctcattatcacataacataaaatgtattaataataggtaattttaaatcatggtgtttatattagaggagatcaaaaagaagagagaaggctgggtgtggtggctcacgcctataatcccagcactttgggaggccaaggcgggtaggtcacttgaggtcagtagtttgagaacagcctggccaatgtgataaaaccccgtctccactaaaaacataaaaagtagcctggtgtggtgctgtgcacctataatcccagctacttgggatgctgaggcaggagaatcccttgaactcaggatgcggaggttgcagtgaggtgacattgcaccactgcactgcagcctggacaaagaaaaagaagaagaggaagaggaagaggaggaggaggagaagtataggaggaggaggaggggaaggggaagaggaagacgaaggagaaggaggagaagaagaaacatcacccaaggactctgcatcctcttctggagaaagagtcagtgcatttttggctataaggaagataggtgtatcatgttaggaggaaggaggactttgttcttacctttctttggaaaataaacatgatttaaggaaacgtgtatgggtgactggatgacaagaatggactgtgagggttagctttgtgtgtcaatgcggctaggctatagtgtcctcctcatcaaaaattattatagatgttgcagtgaatttcttttcagatatgatgaacatttactaccaactgactttaagtaaagcagactaaactttataatatgaatgagcctgaaacaaaaaattgagaaattttaagagcagaaccaaggtttccatgaagaagaagaaactctctgtggactgaagcatcaactacagcctgggagtttccagccttcccttcctgatggtctgccctatggatttcagacttactgagccagcttccaaagtctcataaaccaataaatctcatatatatatataagttctatttacctggtagaaccctgactgatatatgttttcagtgctttccccccagagaggtgggaaaaaaggtctactgctctgtaaaaaaccgaacataattattattgctttaaaattcctcatttgattctttatcatctgacatcccaggtacttacactaattatttttatttatctatggaaactctgtaattatgaactgtgttttgaaacgccaataatatctacttaatttctcattgaaataaggctttatattttgctctatttaaaaactgtcatattacttttatcgcttctgtactttctattaaaaatcacatattctgagaaaaaacagaggaatgataaaacattaactaatataaatgagtaggtattgagaggaagagatggaggtggtctctctttttctctctctctctctactgtatcattaaattttttgttattgccatcagcatatatatatgtatatatatgtgtatatatgtatatatatgtgtatatatgtatatatgtgtatatatgtgtgtatatatgcatatatgtgtatatatatgtatatatatgtatataaaatatgttctctaatctaactgaaaaaaaaaaactctgtagcacaaacctccttctgaacgttacaaccaatctctgttctccttgacagcaaatacaagggccactaccacttcagttctctacttcctcatttcacattttcacaacaacccattctatatgggttcctttcctgattactgcaccaggactactcttattatggataacagtgacatctgttgccatgttaccgcactgcaggttcagacatttggtgcttggctaagaatccaatggggggaaatctaccatctctcaggtaacagtggaatcttatgcccctaagcatatatgactcagttgaccagtcctttcatctttgaatagataatgttcctggtgacatcactcgtgtttggtttccctcccacctcagtgacttctctttctcaatttccttgattggcccttttctgacttttaaatattggtgtacccaagggcccaattctagaccccctcacctatttgtgtcaatgtagtcatcctaggtaatttgtccctataacttgaaatcccacctgtccattgatgacccctcccaaatctccatcataatccacaacctcttctcagaagaagtcctgactggtatctacctccctcctctgcatttccacttgaaaatctaactgaagtattttatgtggcatgaccaaaacagaactatcaatctgattcttcccaagaaactgattgccatgttttccacatcatttccaattttagaaaaagtcaccaccctctacctaatatcttaagtaccaaatatgagttattcctgattcttttactgtcatccatcaccaaatcacattgactctatgtcagaaacatcgatcaaatctgtgtgtttcttttctatgcactgctatcacgtgactccaatccacctccatctggatgactgtaatagtctcctaattcttctttctgcttccactcttgctttgtagcaatccatctttacaaacctttttcatagtgtaagcatcatcatgctcctcccctgattaacaccctataatagctgtctattgcactaataaaacaaacatttaaagcctttctctaggaaagcctcatattatctggttcttgcgtattctctcacgtcatgtttcttctcacttattatgatgtaactacactagtagtatttttatttctcaaacacaccaagcttactcttgtctcacagtctttgtactaaccactcctctgcctggaatatttcttctcttgaacttctgaaaccacctttgcaaaactatgaccgagacagtgaaagagctctaatttaatcaactccatcttgcttctaacctccgagctgtccttgttcatttctgggtgtaggctgaactgactttgggaaaaacttagtttgtagtttaaaacaaagatgataacagccctttcccaaagcagacctccttcttccctggggactagattgccttgtagaactaacattagccacaagattagaaattatggtttaggagtcatgcagctggaggctacaagattctgaccctccctaaactgctcctaagatcagtgtttgagatattttgcagactctacacttgatggatcagctggcaccacccagatggataaactggctcatctgatcttgtggcctccacccaggaactgactcactgcaagaagacagtttcaattccctgtgatttcatctctgacccaaccaatcaacactcttggctccccggcttccccccacccaccaagttcttcttcaaaactctgctctctgaatggttggggaggctgatttgagtaataatgaaactccagtctcctgcatagctggctctgcgtgacttactctttctctgttgcaatttccccgccttgataaattgactctgtctaggcagccggcaaggtgaacccattgggtggttacacttcacattagcagttcatgtaattctgatttcagctcacatgtcacctcctcaagatattgttttctgagcctctaagataaagtagcctctcagtcactctccattctagtccatgaaactgtacttattctcttgataaccttcattgctgccttctgtcaatcacaaaattacccttttccctcaatctttacaatcactgatctgagtgcctttgcatttctcactctctgtctcttcatctattgaaacagcctctgcattcacctgctattctgtgaaaggggagtagatttccaccgaatgatgtctgcgccagttctggtagagcttggtaagcatgagttagaaatttggaaaccactggagaatgaagagcaggggaatgtcatgatttgctatgtttttaaaatttttatattgactctgaagccgaatagcaactttcaaaagagtaaatattttccattttaattaagtccaatttatacttttttcttctatggattgtgcttttggtgtcgtgtctatgaactccctgcttagccttaagtcttcactatttcttctatgttttcttctaaaaagttagtagttttgcatttaatatttaaatctgtaatccattttggattagtttttataaaggaggtaaaacttagattgagggttttttgtttgtttttatttatttattttttttcgagacggagtttcgctcctgtcgcccaggctggagtgctgtggcacaacctcggctcactgcaagctccgccctgccgggttcacgccattctcctgcttcagcctcccgagtagctgggactacaggcgcccaccaccacgcccggctaattttttgtatttttagtagagacaggtttcaccgtgttagccaggatggtctcgatctcctgacctcgtgatccacccgcctcggcctcctaaagtgctgggactacaggtgtgagccaccgcgccctgcctagaatctcttacatgttctcactcctaagtgggagttgaacaatgagaacacatggacacagggatggggaatatcacacactggggtctgtcgggggctggggggctaggggagggatagcattaggagaaatacctaatgcagatgacaggttgatgggtgcagcaaaccaccatggcacatgtatacctatgaaacaaacctgcacattctgcacgtgtaccccagaacttaaagtaaaaaagaaaagaaaagaaattattcttcaacttcacattcttctactcactccaaagagtctattgtactccaaagcgtctattaagtatgcccttaacaagctccccatccccagagatatgttcttcatctggattttatattccaccagctgggtccttgctctgggaagttctaggtcctgatctcctggagagagtcactgtcatgtaattttcacagcagaagttagcccaagggacaggaggaggagtaagagaactgaaaccagttggggaacaggaaacagaaagcagagctccttctgatttttaatggccctaagaacacaccaatatactacttgttttaatagcagtggattgttgtgggcccatttaggaactaaagtacctgactgtgtttctcaacctcagtctttgtgggatgcagagattcaaccctctcaacctaaagggccaaggaatctgggtgtccaggacccttctctctccaagggtcaaggtaaagagaggagcaagtactgtaatgatgtcagaggcactggaaccagagcaactccatgttgaatagtagctgggtaaaattaggctgagacctactgggctgcattcccagacagtgaaggcattctaagtcacaggatgagataggagttcagcacaaaaaaacaggtcataaagaccttgctgataaaacaggttgcagtaaagaagccggccaaaagccaccaaaatcaagatggccacgagagtgacctctggtcgtcctcactgctacacccccaccagtgccatgacaggttacagatgccatggcaacgtcaggaagttaccctatatggtctaaaaaggggaggaatgaataatccaccccttgtttagcgtatcatcaagaaataaccataaaaatggccaactagcagccctcagggctactttgtctatggaatagccatgctttattcctttactttcttaataaacttgttttcactttattctatggagtcacgctgaattcttccttgtgcgagatcaagaaccctcccttggggtctggatcaggaccccttccagtaacagaagaattagagggaagcaatgaaaggcagaatgaagacgagaaggatggagaccaaaaccactgagagattgaagggaggcagagaagttgacaggacagagcatccacacccaggcaccccaagattaaccccataatttttggctccagtggaagctcatttgtaggtttctagtgcaaagaggtggtgggctttctgaaatattaggttctatccaagggtatcagagtggtatggagataaatgggaagcagagacagaaataaggtagtccacctaaaagcattattcccaaggctttgtgtcattaaggctgtttacaattttaagtagtttataatttaaaattacacctaacaatggcttaaaccaaagacaacatttatggtttatttgctttccaagaattttgcaagtgagtagtactaaattactttctgtccaaattatatcatttaataagtttattttgatcttttcactttttcatcactattttggtgtgttttttttttcctggaaattgccacctcacggccccaagatagctgccatagctcctggtctcacaatacagcatctcatgccaggaagatagggatgaaatgaaaaaatactgaaaattttagatctgaggcgagatatgttcagatttattttataaaaatttatctttgggtcctaataacaagaagcattttagaagattcccaaggaaggaagggtaagaagtatagatgtgtctaagaggcacaaggaaaccaaaatactgtgtgtgtgtgatggttgggaggggggaattaaaataagggaaatggcagaggacaccattatgcataaaggagaaggacccagatgtcaagagaaaaaaagaggcaaaggaccccacagagactaattgccaaacacatttgcaagtcttttgaagtccaattattcttcctaaaactgggttcctggatgcctctgcatgtttcccataaactctcgttattaaaacataagcagttgggtatggtggctcacacctgtaatcccagcactttgggaggtcgaggtggacggatcaccaggctggtcaggagttcgagaccagcctggccaacacggcgagaccccatctgtgctaaaaatacagaaataagccgagcatggtggcgcatgcctataatcccagctactcaggaggctgaggcaggagaatcacttgaacctgggaagtggaggttgcggtgagctgagatcatgccactgtattccaacctggttgacagatcaagactccatctaaaaaaaaaaaaaaaaaaaacaaaaaaccaaaacataagtaggttttctttcttgctacgaaatggcccatgattaacaaaaatgcctagaggcaagtaaacagaataagagtcttaaaatgaactttcactccaatggggcaaaaatcatctaaggatcgtctcagtcagacatgggtgagactcaaagtatgattcatcctgaggcaaattcctcttcagctgtaagcctgttaaatcagacaattacgtgctttcgaaaatatagtggtgggacaatctaggattgacattcccatatcaaaaaggagaaataggaaggaagaaaggggaaccagatcctgaggaagtccaaaacaatgtggcaaatacattttaaggcctcagtataatgttctttgactccatgttctgctttttggacacattggagctggggttgggccacaacagctctgggcagaaccaccatcatggctttgctgggtgtagctgatgcagcagctctcaggggctgaagtcaggtgctgtagctccccaagggtggtattgcacacaggtggctacactgttctgaggtctcaggggcagcctcacccccagggttccactggacattgccctagtggaggcactctgtggtggccccatccccgctgctgtactgggcattctcttaatgccatcatattgggggagggactctctgtggagagacagagagtctctggagacagccctctccctgagttgcatgcctgcgactccaggtagcaccttccttcaaaatctaaggggaggcagccacaaccccgcagctcatgcactctgtgccctggtggagatgacaccacacagatgtagccttggcttacagcctgtgccatccagagaagtggcctgagccgcagtctggcgtgcttgagccaaagcttggaaggccaaggagtgctatactggaatatggggaatacaatcttgaaattgtttgccgccaaaaccttgaaattgtttgcattctgtgcctgtgatgggcagggaagatgtgaagatctgtgagatgccttcagagtcattcttccattgtcttgatgaatactatctggcttctatccatgctaatctccgtatcaaatgttcacttacccacaccattggtgttctcccctgaacatacttttgcactttttacaggctgagaattttccaaatctttaggttctacttcctttttgattataattgccttttttttttttttttttttgagatggagtcttactctatcacccaggctggggtgcgcagtggcgcgatctcggcccactgcaaactctacctcccaggttcaagcaattctcttgcctcagcctctgagtagctgggattacaggtgttcaccaccacacccggctcatttttgtatttttagtagagacagagtttcactatgttggccaggctggtctcgatctcctgacctcatgatccacctgcctcggtctcccaaagtgctgggattacaggagtgagccaccgtgcctggcctataattgccattttttatgtaactcttttcctgcattttactataagcaatcaagagaagccatgccacaccctcaatgctttgcttagatgtaacttccaccaaacatcttattccatcactcagaagttctaccttccacaaagcacaaggacacagacacaattcagccaagttctttgccactttataatgaggctgtcctttcctacagtttccaataatatttctcattttcatctgagatctcatcagaatgacctacttctacatttctaccaatactctgatcattattgcaatcttcttctgagcctgtagcagaatcaccctcaacgttacattcatggaaatgtagagttttttctagcactcacaaactcttccagcctctcacattacccagttccaaagccatttccacatttttaggtatttctaattataatacctctacttcttggtacaaattagtcttttagcccatttgacctgctataacaaaatctattagagtaagttatgatccacataaatttattactcacagtactggaggatagaaaaaccaacattaaggctgggcacagtggctcatgccaccataatctcagcagtttgggatcgcttgaggccaggagtttgagaacagcctgggcaacatggcaaaatcccatctttaacagaaaaaaaaaaaaaaattagccaggcatggtggcacattcctgtaatcccagctgcttgagaggctgaggcacgagaatcccttgaactcaggaggtggaggttgcagtgagacgagattgcactgctgcactccagcctgggtgacaaagcaagactttctctcaaaaaaaaaaaggaaagaataaaaaaagaaaaaccaaggttaggatgccaacagattccatgtctgatgagggcccattactcatagacagcgccttccatatgtcctcacatggtggaagacagacaagctccctcaaggctttcttacaaaggcactaatcctatttatgagggtgcaaccatcacgctctaatctcctccctatggtcccgccttttaataccataacctagggggttaggatttcccatacaaatctggggaggggagaaacaaacattcagactgtagcagatgcagcaatagtaactttaggaatgtggaatttataaagagcactcattcttccccattccccacagccatccagtctccaaggctggtctactcagcctggacaatctgtctctaagctacgcctcttcttgatcacactattcctgccctgggtagctcttcaagaaccttaccttgatttctggcaacattctccattctaatatctctgtctccaattagaaacattctcaaaggcatccctttgcaggactacagaacaatatttttcagaagcacacacctgacaagtcactgtcctgcttaaatggttattcatgttattatgaagaaattccaagtccttcttgtagcattcaggaccctccaacagatggcttctgccacttgctacacactcagtgtttattgctgtctgcctcaccatctatgctccaataaccgcaggtaacctgctattttttgaccctttcctgcgtgctttcactctcctctgcctggaatgtatttttttttgcttctttatctgagtctttaagattcatcccggatgttatctgcattgcacttggaagtgaccctggaccctgtcagtctcagttagttgttccttttgggaaatctcataatgaaccaggcatctgtctatcactatatacccccactctactgtgactgcttagggaaatggcagaggacaccattgtgcacaaagggtgcataagactatgcttagtcacagtagagtgacgctgtcacctctttacctgggtagtcggcatctccagggtaaggcacatgtctgtttaagctctatgtctgcaggagccagcaagggagcacctcttcagaggcctcatgcaatacccaccaccctttattatactgataagtaaattccattttaatcaggtggcaggtagcaatgtgccactgtcctaggaaagcaatcatgattggcctaagccaatatgagcaacttgtcttttttttttttttttttttttttgaggtaaggtattgctcattgcccaggctcgagggcagtggcatcatcatggctcactgcagcctcaacttccctgacaaagcagtcctcccacttcacctcctgagtagctggaactacaggtccacaccaccacacccagctaatatttttttggttttagagatggggtctcactatgttgcccaggctggtcttgaactcctgagctcaagcaatcttcctgtcttggcctccccaaattctggcattacaggcgtgagccactgtccctgacctttatttttatgtatcggtatttttgttatttcttggccattgattggtctagagatggcatgctctggcaatgaaagacaaggagaggtcctgaagagactctggacaaggtttccctctgtaataaaatggaagaggcatgtgaatgagtcacattttctgcctgtctcatgattctggctcgggagggcctgttgatgcaatgtccagaacagtggcagccattctgtggtcactttcaagaaagccctagaagaaaaccaatatgatgatggagtggaagggtgacattaaactcaatttttgttcaaactccagatctatccccttccaaaactttttttaataataaatttctccatggcttatgtgcttcattggtttactctaccttatcactgaaaacatccagtgaatcagagagaaaatagaaaatagttgactcttgttttgtggctctccactgtttttcatggttctattccttgggcttgagaacaacattctgatggtgtttaaaaactcagaaagagcccatctccttagatcagtagtccatagagcatctccctaggggcagaaggttagggggttaatctcggcaatggtgtggagtgtacagtgtctctcatttaccttccttacctctctacatgctcctagttactgcttctctttgtaactctgaggtatgaaatacctcaaagcatatttgattttgtcacagatttctggcacagggctcttaaaacccttggaattccctgagtgataggagtattatttgttattcataaacagccccttttgatcatagctgagtttatgctaaggagatcatggccttaggatgggactggtcaccagaaagaccaagggattagagggttggagctgtcagccccacctactgatctccaggaaggggaggcagggactggagattgagttccataaaaactcttgaacaatgagatttgatgagcttccacattggtgaacactcaggagtgctgggagagtggctgcctgaagagagcatggaagctccatgcaccacccaaccccttccctgccatatacctgccatatgcctctttccaatggactattcctgaggtatattccttatataaagcaacagatgcaaacaaagtgctttcctgagttctgtgtgccattctagcaatttattggtgtcattggaacacccaatttatagcctgtcagtcagaagtacaagtagccacctgggacttgcaacagatgtctgatctgatctgagaacagtttgtgggagtgagccctttagcttttcggatctgagctgaatccaggtagacagcatcataaccgaatttttaattgcaggtggcccaggtggtgtccccagagaattggagaatttcttggtgtagagaaaaagtatatttggtcagaaggattgtgaaagtagagaatcgagtttttgtttcaccgtgcatctttgtttttttattgtttttcctctcattcttctcaccttggtaattgtttctttcattttcctgaatctctgaaaagaaagggcctggactctcagatttcttggcctttgatatttggaaggatgaactccagtctcccacagaaggctagaggtgaaggaacattcagacacataagtttccaagataaatcgtctgagaacatctccaaggtgtcttctgggaatggtaagaaaccctgagtttgtgtcactggattgattccagctccattgtccccgtgtccttcaactaagtctctgctgaagcctgttctataaaaacagcaagtaagtggtttggactgacctattgtactaggttcgacaaagcaaaccaaatggagtcagtcatactaaaactccacatcaccaaaccaaaactaatgtatctgaacttttgagaaatcaggagagagagaaaatggacaaattcctaaaacaggccagtttcagtgggcatgaacatgaagttctgtctgctttcatctttacaaaaaaaaaaaaaaagcaatctgtggtaacttgacttcaatcaatcagttgttccttattgctgtctctctattcctgctgcacaaaaaaaatgcaacatccagatgaccaatcaggtttttgttctctgtttctgctttctttagccctcctatccctgtaaaaccaacttccttggctctaactatcaaaacactcattttgttttatagcatgacaggctgtctgattccatctttataaccaaagccaattaagatcttaaaaccaaacatataacttcatctttttacaagtacttagagcctgagttgctccacaggaatccaggaactgggcacaggaaaaggatctaagctggtggtaagttggggtctgaaaattttaaagttattgttgaaatgcctgctatatgacagagcccttctaactctggagtagcgtagtccagtgaagaatccacttcgttagtatgaaaacaatgttaactatttcattaacagtgtttaatttggttacatgttccagtaacattctttttttttttttttttttttttttttttgatggagtcttgcgctgtcacccaggctggagtgcagtggcacaatctcagcccactgcaacctctgcctcccaggttcaagcgattctcctgcctcagcctcctgagtagctgggattacaggcacctgccaccacgcctggctaattttttgtatttttagtagagacggggtttcaatatgttggccaggctggtcttcaactcctgacctcgtgatctgcccacctcggcctcccaaagtgctgggattacaggcgtgagccaatgtgactggccaattctttatcatatatgtaattaaataaaatttattactaaaataatttccccaaaggtgttttacttttttaaaaacagtggctacaaaaaaattttgagtcccatatgtagctaaagttaacacattatatttctactggacatgtagcattgtagagatgtagcattgaaggatcttgatagtcctgtggagcttacgtactagtgtggagggtatttaagagagaagataaatgaacaaacaaataaaggagaaaagtatctggtgagataggctgtacctgagcattctgctttgcagagtgggtgaggtgggatctctctgaaataatatttgacctgaaatatgaatattcaggatgagccaggtgcaggaagctcaagacgaagagcacggtaggcagaaggaatagagaaagcagaagccctgagatgacaaagagctgcaagttcaaggaattagagcccagtgggtggagcccagtgtgtctgatgagagtgcagagatgaggtctgagggatgcacagggcacatgtggcagtggataagggaacctaggataagggaacctaagataagggtaacttagaagtctggaagccatcggaaggtattgcgaataacatcaccatcttattggacctttttaaagctcatttggtttctgtctggagaatggatcttaggggagggggcagcaggaccaggaaaaagctatttgcaaggcttgtgcaaatatccaagcctgacagggccatggacaccggtcgtggagatggcaatggctctggctgtgcattcagcatgttctgtagatagaatgagtaagacgtggatggcgttgggtggtgaggaaaagagaaatgaaaggtgagttctagatctggagctttaacaactgaatatttaatctccaaatagatacagaatattggaagagtggcaggtctgggaggcagagaacatcaacagtttggtaaaaccatgtgaggtttggagtctatgggactcccacggggagaggttttatcagacttgagtgccagggagaggccacggctgataatttagatgaaaagacagcataatggtttaatcccagagactggatgatatcatttatagaatgtgagataccccaacatttagagtcaaatttagaatagaaaacaccgtaaattggactaaaaagaggaagagaatcgagctgtagagacgaccaagagtgtattgtgtgcacatatctcttggatatatctcatggcataggaaaaatgtgtttgaaaagggagaaagtgatccaatgggtcctgtgtcattgggatatcaggtcttaaaaactgagaaggactcactggatttggcagcctgggggtcataagcatccttgggaaaatgcattaggtggagtgctaaggacagaagtcaatgtggagtggattaaggagaacagctgaggcgaagaaggaaaaggaagaattagagacattctctttggatgtttggctggaaattctgtcttacagacagaccttacagagaggtcatttggctagatagggttgaagctggaaagaaatatgcttcaaaggaggtttctcttgaaagagagggggcgtgattatgtgatagaatgatctagtagaaatacaattttcaatttttttggtataaaaaatgatcttttatccctcaccacatcccacctcaatctaagtcttaactttctcgtctgtacaatggttatacaaattaaaactaacattaatcaatattcaccgtgtctcagggtgtgttgagtgcttacacatattaacacatcccatccacagagcctatgagaggagttgtgagggttaagggagaagctcttggtgtgtggataatgttcataagtagaagctactattgctataagcatcgttcttgtcctgaccctgagcttcatagtgcagggttcgggattgtaccccacaacacaacacacagcctggtgagggctaagagttctaatttgttacagatttaccgacctatcctagatgatttccatgtctattctttttttttttttttttttttttgagacggagtctcgctctgttgccaagctggagtgtagtggtgcaatctcagctcactgcaacctctgcctcctgggttcaagcgattcccccacctcagcctccagtccatgtctattctatttaatcctcccctgaaaatcagtctttatcaaaaaaccatttcagttctgcagaggggaaaatgggggctcaaagagatgtcactgatcaagaatttacaccatcgaggtgtcagagataagatcagagtagagatctaactgactccaaagcctggtactctttacactgttacagtgacacccaactggcagggggagggggtgggaggtattttgcctcccaggggatctttgacaatgtcttttggttgtcactcctgaatggggagttgctactggcatctctggatagcggccaggggtgccgctaaacatcctactgtgtacagaacagtccaccacaacaaagaattaaccagcccaaaatgccattggtgtcaaagctgagaaaccctgagctacactaaacaatgtccctgggaagacctcagtgaaagtgactgataatgataggaaaaaagaaggaaatgagtaaaagaaataggagaaaaaatttattatacgagggcaggaccctatcctggtaattttggaagaacgcctttcaatggcagcacttgagcgtgcaaaggtagtggctctgttcggtctggtttacaaatcttcctgtctccactgactggctaggtatgatgctgaaaaaactacaggagtccctgggccatggattctccctagtaaaaaagggatgatgatggctgcctcacagtgttattatgagtattagatgtaaacaagtgctacataattgctatcattcttaaagaggctaaatagcccagggtgggaagattctcagattttcatgatcatagaaaattgctgtagcttggctgggcgtggtggctcacacctgtaatcccagcactttgggaggccgaggagttcgagacagcctggccaacatggtgaaaccccatctctactaaaaatacaaaaaattagccgggcgtggtggtggtgcccagctactggggaggctgaggcagaagaattacttgaacccaggaggcgaaggttgcagtgagccgagatcacaccgctgcagtccagctgggtgacagaggaaaaaagggaaccattcggacatttgcccctgaacttgaagtgcgccacaccccactcccactgccagttgccacccccgtcagctctctttctgcctgtcctcttgctcctctgagtgtggcctccagatgtctcatgtacctcccggggtctgtgaatactaaaacctctcgaactttaacactgtcgtcgcctcattgaagccgcacccacaatccaacccacgatgtgaggctgcccgaaagcgacctgggcagttggatcccctcttgatgttcttttgtcctgacctctggtggctgctgaggatggtcactagcagctgagttgatagagaaacttgaagagcttcatttaatactactggcatagcaggcaggcttttggctgtgtcttggacacaatcccaatgtctgtgtgtgtggatgactcacgcacttcctgcatcagacagcccagtcggtctggcccagacggcactactgcttgctggtgctccattttgctgcttcgtgcagcttagtactgctgtcctcagcagttaacttggagattctccagaaattccagtgaccgtggacggctctttgaggctccaggctccccagcagctgcaggagggcagatcctattgtaatgagggtgtttccctgtgggacatcagaaaccctttctgggatcaggcccctgacagggggccactactggagggcatgttgccccttgagccatacatgcttctctggtgacctagggcctcggtagtggtccggcctgtattggctctaagtagcaaagtactggcctccagccagagagagctggccaggatgctgagctggccacccggtagcccatggctcgatcctcagctctacctccatcttgctgatgatagggccatgggccaccaggctcctggggagcagcgattccaccatagtgaagttgaagaggatgacagaatgctggcttcagtgtgtcagtgaaggggagctgggtgaaagggtccagtcgcctaactctaacctgtgacacggcaactgcacctgagtccccagggcaccttgcaagagccggtgctgctgaggccagtgcctccttggttgctgcattccttggtgctatcacttctcgttctcccagcccctcagaggtcgatcgggtcaccctggaaagaaaagcggctgcctacaaggccagtgcaagtggagctcattgttcggttttgaagagaaagtgagattaaagaaagacacacaaagacagagtgtctcaacagcaaatgcaggcatttatgtccagtataaacctgcagaggtgccagtgcccaccactgcttacaggctggggcaattacaggcctgggtgggagaggtctggaagtggagcatggcccgttgcctgggaaaatgttgataacatgttcccatgatgaggcggtttggcacttgttcctgcagaatgtgatagtgatgttccttgggcctttgcccggcagagtgtgataaggatgttcgtgtgccttgtggtcaggtggttgggcaggatgtttctcatggcccgaaaccccatggaatgtttcactttgaccaaagtctgcaaaatggtggggggcttacaaagtggtgcagtttggactaactctcaataccatttttttttcttttttggtaacaatgtgtaaagtgaaaacagcagagtgctactccataccactgggatcttgtccagtaaacatccagagagtgaggttaggaaataaaaagtatataaatattagatgcctagaaatgcaagtcactttaaagattttatgtgaaatagaaaaaaaagagaggagagggactcattgtcttgtaatgggtccttcccagagagaggtgactgtccagtggcaccgggcccttttcctccttccccttttactcttatcaactaggacagaaactaagaattttggcttcaagtggctaaaagactgatgggggaaaaaagaaaatagaaaaaaataacagagagactgacgctctaggcagttacaagtccaagaaaaaagacagaaacttttaactttaagtattgagccaaaaccaggtctagcaaacataatgctggccctagattatttattaatttatgaagaaacttctagatatgggggtgacaaaaggaaattaaatccattatatatgcatatattttaatgtaaatatataatagataaattatgtatacataatatagaaccaaattgaaacagttttacaatttggtttgactggaaattcaaaatccatatattaatttttgtagtaaaagtttatgtaaaaaaagacaaaaaggacactgattggcttttgttcctctacaatataggttctaacttaacttctaacattagcggccggacgcggtggctcacgcccgtaatcccagcactttaggaggccgaagtgggcagatcacctgaggtcaagagttcgagatcagcctggccaacatggtgaaaccccatctctactaaaagtacagaaattaaccgggcgtgatgctgggtgcctgtaatcccagctactcaggaggctgaggcaggacaattgcttgaacctgggaggtggaggttgcagtgagccgagattgtgctactgcactccagctgcacgaattgacaaaatttatggacttcatagtgggattcaaattatagttatacatagggatctcattaaatttacttactctactcccataatcttgagaagctaactaaaattttgaaaaatgagtagacctcactttatctgtagcgtcgcctaaatttcccagtcatacagtcattgctctaaaatattctatgttggacatagattctgtgacacaattaataacaaattaaaattaaagtaagcttttggcacttacaaattggcttgatcaaatgaggccccttagtcccccagttaagataatttattacggcccaatagaagttgaaacagcaccttcaaggattaaaatttattatataaaaccgaattaataaaagcgtgattatcgacaccacatctccatttagcaacccaaaagttcttcctgttcccaaatctgaaaaaaaaaaaattcgtaaaaatgccttacgatggatgactacagcagacgggctgttgagggctgcctcagctcttcagcccagaccagtgacagagctaccaacactgcttcacctcctgcagaggtagaggtacaggcaatgagaggagggggtcagggatattttttagccctttctcatcctaccctcatgccagtcccagctttatctacccttgagtcatattaagccattcaaggatgagtggatgaagtttttaatcaggaaaaaatacttccatgccccccaatttgagagtaagaaatagaaaatgaggctattgtgggtgtcatttctaatttctggacctcagcctgtaccctggggtaagtggaagtggaaaaaaactacaagaaaacagaaagagtggtggggatttgtaaggcttggatgagatagtatatattaaagggaaaacttaattactttacccttaagtgtaatgtttgctgtcacctttttgtatctttctctttttaatcagactgttgaaggtgtcttctattcttactttttaagagttctcttcttctattgcttaaattatgaatggatgttaaatgttttcaaatgtaatatctgccaatattaacatgattatttttattctttcatttacatcgttacagattattttattgtatacaactgtatacaaacttcatatggttcctttcatataataagaatgtaagctgtctgagggcaggaattgtggtctgtattgcttacagatgaatcctcaccctctatgtgtaaaatagtgtctgacatgtggtaggcactcaataaatactgaattaatgaatcaataaatagtgtcacctagatatttaagtgagaaacatttgatgtctaattaaaattatctctgttacaaattattttattaaattaaattaatttaactaaaattaaaataacgtgaaccaagtcatgtctagtaaattctcatcctcatgtgcgcaatatttataaattcccaggtggcttccattttcatgaacaccttaaattttgagtttccacttcaatacagtactctcactaacaactgcctaatgactttgtatttaaataaataaactcataactcagccctttaccttgctttctccacaaaaacactcagaaattgtcaattttgtattgtgtaacatactttcctgatgcactggcaaaagacaccactcaacatgaataccaaggaatcctgttatcaatgtcctctctcactccactgctttactcattcttctcgtcttctctagagttctgtgcatttccaaggcagagcagtttgaccatttcattcacacttttgactcctataaatgctttcaatttccaaaaaaaaaaaaaaaatgtatattctttaatgcccaactaagttgtggccatagaaaatgaggaacaatgaaaaaaatgcaagacagaaagtcaggagccacgaaggacagcgtgagacctctagataggagagccagggcttccagatgggctaattaatagactccctctactgccaggacaggggattcttacctttccttcccactggccttggttaattgcagtagaacagtgtccgctacatctcccttttttcttttcctcattaggagtttccattgtggattcccaattctcattgcatcgtggtatattggggctttgaagctaagtattcttttaagttatgggacacttatcacaaagaaacttcaacataaaacgttggggatctcatccttgggaaggatggctctacttcttctatttggaagaagagtgtaaagggatcttgagtacctgaaggcataattctggccaagactgacagctgcctaaccaacattaatcacccttcttcactgcagtgaatgcttataagggtctgttgcctcggcatccagtctaaatacaagcttaattttctcatacgaggctcagggctcagtcacccttgacacagtttccagttctacaccacagtcacgagtacaagaaaaaaaaaagaggaactttaaatttaagtactgggcagaatccagatctaggaaacgtaatcctagccctggaatacttactgatttatgaacaaacttctaatgggagggtgataaaaaggaaattaaatacatcatatgtatatatgtatataatattttaatgtaaacataggacaaataggtgaattatgtacatttaatatataaccgcatcaaaacaaagttttacaatttgatttgattgggaattcaaaattcatatattaatttttataccaaaaaaattatgtaacaaaaggataaaaaggcactgatttggttttgtgcctttacaacataggtactaacttaacttcaacaacagcaaaaatgctcaaattgacaaaaatttatggactttacattggggctcaaattatagttatatatgaggatctatcgagcacccgattctgtggctgttcggggcgccactatgtaacctgccatgatccctggtggactgaacaaaggggggtgaatgcaggaataaaagacaagagacaaaagagtatatttggaagaaggggtccgggggcaccttgcctctagtggacaaggccctgagctttacacggccctctgtatttattagagaaaagcgatagtgagaaggggggtggaagaagaggtcagttggttggtccagagtaggcttgcaagactgcattctctagatgttccagtagataacttcaaagagcttggcgtcaggaagcgattgccctcagcaaaccttctggcggcaggcacagtcgtgagtttgctcacatcctgtattcatgataaacagtttgctgtttgatcatatagcctccagtggaatgctgagttggtcacgtcccatgggccttcggctccctgcatatccccctgtttatgaattaattgaaagaatgtaagaccaggctgggcagctctcattctccgattggcggtccatccgattttacagactataaacagaagacagagacaaaacaacattactccaagaactacatataagatgttactgtggtactttagataggtccaagggttgaggctctccaggccttcctggaattcagtccagtcttctaaagaaggctgaaattcttgagtgtgcctatttaaatcaagaattttgttttgtaattcactaatatcaaaggtgatgttggatgtgaaagctccttgcaaatgggctttcacaaggtcccacggatactcacttttgttatattctaagttggttacacaaatacgagtgtgattaaaatgacagcgcaattgccgctgcaactgcaagctttatacttgttcccctaaccacagaaccatggatttcaacattgccacttcagtttgtaactcagtgttaattttattctgaagtagcctcgcttggttggctgtacgtgtccaattctctacgtactgagccgtttgaacagaactatgcaaagttacagaggacatcacaacagaagttattagtgtgaccaaggaaacgatagcaaaaattatcatgcctaaggctctacgggcacaataagtaacctgaagtagaagaagtttcacaaaatgcaaagcaggtgtggcagcccaagcctcggacagattaacaggaatccctagcccagggatgcaacctaaaatcatcaaagtcgagatattatgtgttcgcaatgtgctatgattaatgcagtgatataactggcaagatttacaggtcaactgggtattgtttacctggagctggtccttctgagctgccaaaaagacataaggattaaaaacacaaaccacaaattgagtggtgatattctttacaaatgtaacattaagactgtgtcgtgactccagtcggccttctctccatctttgcactcaggctcagctgactcatggctcgtaccggagggactgggcccatggttggccaccccatgtttctccagtctcccattccagggttgcaagcaccttgagggcacccacatggcttgtcaatctcctgtaaacacacaagcataccctcttccccatgtcagtaaatccaccgggcctttccattgtccttcttctggggatttccataacactttcagataaactttcctcttttcctctaacacttgccaatgtctttctgctggagtcttaccatccgtaccaggagtcaaaaattttaaagtaaataaggctaaatgtagttttgattgaggtggtagttggcctcctataccccctttttgtcttttcaacattcgttgtaatgtttgatgtgcccattctataatgccttgtcctctaggattataaggaattcctgttttatgggttatagcccaaagctgtaggaaattttgaaaagcatgactagtataagcaggtccattgtcaatttttaattgtttaggtattcccatatgagcaaatgatgacagacaatgtcgctgtacatgaccagctgtctcacctgtttggcatgtaccatgcagcatatgagaataagtgaaacaaattaagcagttctgggtctagcgtacttttaactgtagcagtttctatgcgaatggctaaatttacaacataagctgaacaagaagaatctccttgcagggtttggtaaagatgtgtaagttgataggtagcaatacctaacatcgggcgtagccaattaatatctcctaataattgctgaaaatcatttaaagtctgtaacctgtctttatggttgacaatgttgattgtagcctgccacgatccctgatggactgaacaaaggggacgagcgtgggaataaaagacaagagataaaagagtatatttggaagaagcggtcagggggcagcttgcctctagtggacaatggccctgagctttacacagccctccgtatttatcaggcaaaagagatagcaggaagtggggggggtggttgctggctagcagcctgattcacagcaggcttgcaagactgcattcttaaaacagtaggcgctagatttctcaatagataactctcaatagataacttcaaggagccagggagtgaggccctccacaaaccttttggtggcagcgcagtgtgagtttgccacatcctgcattcatgataaacagtttgctgtttgatcatatagcctccagtggaatgctgagttggtcacgtcccatgggccttcgggtccctgcagttgataggatctgaagctgtgagctgtaaaacctcacagctgactgcaactagctctgagcattgacctgaaaccccagagatccttattgtttgagtatgttttagtccatagatggcagcatgacctttggaagagccatcagtaaaataagtctgtccacctggaataggtttgtgatgagtaatcacaggaagaatgaaagaatggattttataaaactgtaaaattttgtctgagagtagtggttatctatcacgcccatgaagtctgcgaaagcagtttgccaggcagtcgacatttcccaagctgcagcttgttgctgagagtctaaaggaacaataattttgtcaggatcatatcctgtaagcatttgtgacctatgcctgcccatagtcacaatttgtgtaattaaagaaagataaacttgcaaggttttgactgtttgattagatagaaagaaccattctattactgttacagactagtctataaactggcccaaaagtcctgttggagagtagggggtaggaagaataaacaaaagcaaaggtttttgtggttgtagccatgaggcatgtctctgctgtaacatttgctctacaagctgtaatttggcttctgcctctttagttagttgctgcagggaatttaaagaatctccgtgcagggtttggtaaatatgtgtaagttgataggtagcaatacctaacatcggtcatggccaattaatatctcctaataactgctgaaaatcatttaaagtctataacctgtctttatggagaactactttctgagtccatacacttctctctgtaacaatagttcctaagtattggtatggggaagttgtttgtaccttttctagagctattttgagattccatttagtcaaagcctgctttgtttctctgaataactgatgtaggttttgatctgtaggagcagccaaaagaatatcatccatataatgaatgatgtaagcagtaggaaacatattccgaggcttctttaatgcctgtcctacaaaatgctgacatagcgtaagactgttaagcatgccttggggtaaaactctccattgataatgagaaacaggttctctttgattaatagaaggcacagagaatgcaaatcaaggcttatccttctcgtgtaagggtgtagtaaagaaacaatccttaagatctattactacaagaggccagtctcttggaatagccgctggagatggtgaaagtttttgtaaggcacccatcagttttatgtgtacatgaatagctcttaaatcatgtagtagtcgccatcttccggacttttttggaaaaacaaacactggagaattccaagcttatgtgtccggcatcccattgttcttttactagctgctgaagttgcatcaggttctcctgagataggggccattgatccacccacacgggtttgtcactgagccattctaatagtgaggcagtgggcagaggagaaatatcaatgaccctcgtcagaaatcctgacgtcctagcccttttctatctgtttttccagttactgatattgggttaggatttccttgaagaaattttcctaaacattttcccctctgatatctcatgttcttcaacattttaaatcctgggttatcaaagttttcatttgtaagtctcatattccatgttataagtaagtctcaaccccataaattgatagctatattttcaacataagactgaaaagtacatgactgtccatctggaccaagacaaggtaaaatctcagtgctctgttgaacactttgagctgttcctactcccactagggatgtagaagttaattgcaagggccaggatgggggccaactgtctttagatatgactgacacatcagctcccgtatccataagcccataaaatttctttcctttaatgtgtactacacaggtaggtctattagaggctatgggttgggatagatagatttctcatgtagttgtgctcccaacctctttattttctcatttctcctttcatggagaagggtgtgatttgcagggaataagcaataattgagcagtatattgtcccagctcaaaacccaaagatcttgtgacattaaaactacttgaatttctccttcataatcagagtcaacaacttctgggactacagtaatgccctgtaagttaaggcagattttgcctaaaattagtttcacatatcctgctgataaaggtccccaaatatcagtgggaactttgatgggtttgtctgccccaactaacattacccattctttgactgggagatctaatcctgcactccttgtgttcctggggtgagggaatcaatgtgcctctgggaacccatgcctggaacggggttgaggtctggactgggaatgccctcattgtttgtggggcctgggtccaggcccccatctcatttcccagcaggggggtgccattctgatgaaattttgagcggcactgattagcccagttatttcctctgttacgcaaggacaaagtcctggcattttttccactgggtggggcactgcattgtaaggtcctttctgtactgagatctggcggcattcctttttaaaatgtccaggtttttcacaattataacattttcccactttagggtttgacccttggctccttttagatttgtcaactgctaaattagccactgcttgcgctaatattgcaaagtgatgaagctcagttcctacatcttgacaagctctgagaaaacttcccaagttttttatacacctcaccagtgccagtgcatgtttacaatccgcgtttgcatcctcaaaagctagagttaaggttagcatttctgcagccgtggtatgaggaatctgacgcttcactgcctcttgtgatcttgtaagaaattgcacatagggttcctgtgacccttgcatatgtaaaaaggattgtactgggactccctcttcaggaattgcggcccaggtgcatttaacagcctgtgcacactgctgataagcagcgtctgggagtgccatttgactttccaggtctgaataagggccattacctaatagcatatcctctgtaatgtctccgtgtccagcaacatggttctgtttagcctggtctgcacacatttcttgccaatttaaattccatgtcagatatgcactagtggacaagcaagttcgcatcaagtgtctcacatcaaagggtaaaaaacgcatagcaccaaacacagattctagcaatcctaaggtcaaccggctctgtatgccattatttaccactctcgcttttaattccttcaacaacttactctagtggggtgtgttcatgaataacctgctgtggattgttgggatcaggccttatggaaataggaaaagtgcaaggtcctaggggctctccagctatggcagcagagcataaaattctttgtattggggtctctagttctgctaccaaaggaggcaatacagatgtttctgcaactggaggaggctgtataggccaatttttatcctccctctcctgttttttattttcatctggagctgtgagtgggacaacagattctttcagatttttagattcagcctgttgtcccacagaataataaggagataatggcagaagtacagtatgaactaaactccaagtggagaaaacagaaggatcaattttaagacctttttgatgagcccattttaatccttctgctctgtcccaattttccacatcaagggtgctgcctgtggaaaccatgggttatgtgtaataacctcctgcagcagctaagttaatgtctgagaactaacctgagcaccagtttgtttcaacagaactctaagcaactgcacataattatttttttcagtagacgaattctgccccatgttaccgtgattcagaaaacttcccattcccagtacttctttaaggaactgatcccagtacctctttaggcgctgacctcatgtgcgctgccagctgactcatcccagggtccccatttgcgttgtcaatttcagttcctctattccaggagatcttcttcattcacatcctcatagtcccgtgttcagactgtcgcctgtttgagtgccacttgtagagcccctgattctgtcgctgttcggggcaccactatgtaacgtgccatgatccctggtggactgaacaaagggggatgaacacgggaataaaagacaagagacaaaagagtatctctggaagaaggagttagggggcaccttgcctctagtggacaaggagctcggcaccaggaggcgactcgccctcagcaaaccctctggcagtgggagtagtcgtgagtttgcccacatcctgcattcatgataaacagtttgctgtttgatcatatagcctccagtggaatgatgagttggtcatatcccatggggtcttcggctccctgcaaggatcccactaaatgtactcactttgcccatattgtcttgagaaggcaactacatataaaattttgaaaaatgagtatacctcgctttaactacagccttgcctaaattacccatagtcatacctattgttctaaaatagcctatgttggaggtaggttgctctaaaacagaatatgttggaggtagacataataaataatacattaaaattaaagtaaattgtttgcacttagagattggcttgataaaatgggatcacttagtcccccagttaagatagttaatatggcccaacgtagggtgaaataatggccttcaataattaaaatttgttaaacaaaacgtgattaataaaagggtgactatccacattgcatctccacttaacagcccaaagtgcttcttgttcccatatctgaaaataaaaaatatcacaaagaatgtcttatgatggatgactacagcactaaggctgtagtcccatctatcagggcccccatatctaacatctaatattattaaaaattgctaatactattcaatcaagaactggtaaacattttgctctcattcatttggctagcatgttctgttaagtgcttatttctacagaccctcagctacagttgcctccacctctgaagaaacacaatacacctttccaggctacctaggggtaccctcatagctttggcatcacacacaagctttgcagacaggagcttaatgacatccacagtctccataagcacaggtgcagcattacattgaggacaacctcctctaagaagattcacttgatacacacattacagtcatttaattcgtctcttagtccattcaaggtactataacaaaatttattatgctggataatttgtaaacaacataaatttaggccagacgtgggggctcatgcctgtaatctcagcattttgagagtctgaggtgggtgaatcacctgaggttacaagtttgagaccagcctggccaacatggtgaaactctgtctctacccaaaaatacaaaaattagcaggcatggtggtgaacctgtagttctagctactggggaggctgaggtaagggaattggttgaaccctggagatggaggttgcaatgggccgagatcacgccactgcactccagcatgggtgacagagtgatgctctgtctcaacacacacacacacacacacacacacacacacacacacacaccccataaatttattgatcacagttctgggggctgtaaagtccaagatcaaggtgctagcagatgcagtatctggtgagggccattactcacagacagtgctttctatgagtcctcacatggtaaaagggaaagacaagtgcctataggactcttataaggcactcatcctacctatgagggcagaacaatcataattgaaaacctccaccttttaataccatcaccttggtatgagcaacctcatttatatttttatttttatttttatttttggcccagggaatgatctaaggatgtcatgtttcagtggtgaaagataaggacaggtcctgaagagactctgaaggagtctttataaaggaggatgggatgttttccttttttttgagacagagtctcactctgtcacctaggctggagtgcagtggcgtgatctcggctcactgcaagctccacctcccgggttcacgccattttcccacctcagcctcccgaatatctgggactagaggtgcctgccaccacgcccagctaattttgcttttgtatttttagtagagatgggttttcactgtgttagccaggatggactcgatctcctgacctcgtgatccacccacctcggcctcccaaagtgctgggattacaggcataagccaccgcagctggccgatgttttcctcctttataaaatgagacaggcatgtgaatgaagccagtttttttgtttatcttcatccttctggctctggagggcccgttgatgtgatgtccagaacagtggcagccattctgtggtcactttcaagaagcccctggaagaaagccaataggatggtgaagcaaagggcttaaatgaaaaccaatttttatttagactcagattctatctccttgcaaaactttttgtaatagtaaattccttcttggtttatgtgcttcatatgtttactatactttatcactgaaaacatcctttggtatagtgattcggggagaaaagaaaaaatagttgactcctgttttctgcgtctccacttgtcttcatggttgtgttgtttcagccggaggacaatgtcctgatgttgcttaaaatctcagaaagggcccatctcctccgatttagacctttaactcttctcagattaagatatttgaactaaatttgttgtaattttgtctattaactaatccttagagctgcgttgcaggtcccacaaattatctccctctggagcagaaggttaaggggttaatcttggtaatgatattggataacgggtactctctcatgcatctgcctcacctctcaaggtttttgttttttgtttgttttgtttttttgttttgagacagagtccagctctgtcacccaggatgaagtgcagtggtgtgatctcggctcactgcaacctccatctgctgggttcaagtgattctcctgccgcagtctcctgagcagctgggactacaggcatgtgccattctgctgggctaatttttgtatttttagtaaagatgggttttcgccatgttggccaggctggtcttgaactcctgactcgggtgatctgcccacctcggcctcccaaagtgcagggattacaggcatgagccactgcactcggcctaaaaaccactttttttgtttgtttggtttggtttgagacacagtctcactctgtcccacaggctggagtgcagtggcgccatctcagctcactgcaacctccacctcctgggttcaagagattctcctgccccagcctccaaagtagctgggactacagccgcctgccaccacgtctggctaattttcgtatttttagtagaggcggggtttcaccttgttgcccaggctggtcctgaactcccgacctcaaatgatccgcccacctcggcctcccaaattgctgggattgcaggcgcgagccaccttttatcacatctcattttatgttagtgaggttatttagggcgaggtcccttgataggctcaggttagggctgaccaccacaaaaatcaagtgactagagggttggagctttcagccccacccattgactttcaggaaggggaagtggggactggagattgagctctataaaaaaatgttggctgggtgcagtggctcatgcctgtaatcccagcactctcgaaggccgaggtgggtggatctcaaagtcaggaattcgagaccagcctggccaacatgatgaaactctatctctactgaaaatacaaaaattagccaggcatggtgatgtgcgcctgtagccccagctactcaggagactgaggcaggagaattgcttgaactgcttgaacctgggaggtggaggttgcagtgagccaagatcccgccactgcactccagcctgagggacagggtgagactctgtctaaaaaaaaaaaaggtagacaccaggcacggtggctcacacttgtcatcccagcactttgtgaggccaaggtgggcagatcgctttaagcccaggagtttgaaaccagtctaggatacatggcgaaaccctgtttgtacaaaaaattagtcaggcgtggtatctcacgcctgtagtccccactacttaggaggctgaggctggagaatcccttgagcccagggaagtggaggttacagtgagcagcgatcatgccactagactccagcctgggtgatagaatgagaccctgtctcaaaaaaaaaagaaaaaagaaaaaagaaaaagaagaagaaaaagaaaagaaaagaaattagccaggcatggttccaggtacctacagtcccagcaactcaggaggctgaggtgggaggatcacttgagcccaggagtttgaggctgcagtgagctgtgactgcaccactacaccccagactggggaagagagtgagatcctattaaaaaaaaaaaaaaaacccttgagaaatgagattagatgagcttcttgagttggtgaacacaaagaggtgccggaaggctgagtgcctgaagagagagcatggaagctccatgtaccacctcaacctctcccttgctatatacttgccctatgcatctattttgactgtttttgagctgtattcttttctccttttttttgagacagaatctcactctattgcccaggcttggagtacagtggcatgatctcggctgactacaacctcttcttcctgggttcaaatgattctcgtgcctcagcctcctcagtagctggaattactggcatgtgccactacacccggttaatttttgtgtttttagtagagacaaggttttgccacattggccagactggtctccaaatcctggcctcaagtgatccaccagcctcagactctcaaagtgctgggattactggcgtgaaccaccatgcctggcctaagatgtactctttagaataaaccaataaatgaaagcaaagtgatttattgtgttctgcatgccattctagcaaattacaaagctgatgagggggtcacaggaacccctgatttatagcccatcagtcagaagtacaggtggccacatgggacttgcattggtatctgaagtgaagacagtcttgtgggagtgagacctttaacttgtgcgatctgatgctatctccagttagacagcatcagaactgaatttcattgtaggatagacagtggtgtctccagagaattggagacttgctctgtttggaaaaaagcccacacatatgctgttagaagtatgtgtgtaaatagagaagtgagtttttgcttaatcatacatctttgttgtttattgttttcctctcattttttcaccttggtaattttttgtttcatttccctgaatctctgaagaagaaagggcctggactctcatattccttgacccttgttatttggagggatgaactccagtctcccacagaaggttagaggtgaaggaacattcagacacataggtttctaagatgagtagtttgatgacatctccaaggtgtcttctgggaatggtaagaaaccctgagtttctgtcactggattgattccagctccattgttcccttgtccttcagcaaagtctctgctgaagcctattatgtaaaaatcacaggacaccattggtttaaactgagctactgtactacactcaacaaacaaaaccaaaatagagtcactcatactaaagttctatgtcaccaaaccaaaaactaagttgtttatctggctttccaagaaatcataaagagagagagagagagagaaaatagccaaattcccaaacaggtcactttcagtagccatgaaaatgcctctgctttaatccttacaaaagaagtaacgtaagtaaccatgtcagtcaatctgttttgtttttttttttaaattattgtttccctattcccactgtatggaaaaagcaactttgaaatgaccattcagcttttttttctttgtttctgctttctttagccctcctctccctataaaatcaaacttctctgttctactcatcaatacaggcattctgttttgagggatgaggtgttgtctgattctagaattatgaataaagccaataaaaactttacactaaattagttgtaattttgtcttttgacaaatccttggagcttgtgttgctcgacaggaagccagggactggccacaagaaaaggaactcagctagtggtaagttggggtctggcaatctaaaaattattgttggaatgcctgctgtatgacagacatttcctaaactctggagcagggctgtgcgatgaagtatctacttgccaaatacagcttttttgttttgttttgttttttcagtcttttttttttcttttttcttttctttacttttcttttattatactttaagttttaggaaatgatgagttcacgtcctttttagggacatggacgaagctggaaaccatcattctcagcaaactgtcgcaaggacaaatacagcttttgagtgcttgctatttttctcatttaaccttaagtgtgctataaatataaaatgcatctcatgtcttctaagacttagtatgaaaaaagaacgccatgtatctcattaataatttttattctgattaaatgttccaatgataccctttttgatatataggattcaagaaaatatattattggtgttaatttcccaaatgtttcctactctgtttacacatggttacctgaaaactataagacacaaacacggcccgtgtttacagaccacattgtgtttccattggacagtgctatgctagagacacagcactgaaagaaggtgctacttgtggagtttgtatatcagtgcagaaagtatttatgatagaaaataaatgaacaaacaaataagaaaagcatctggtgacataggctggacctggggcagctgttttgcaaatgggttaagagaatacctctgaggacaagatatttaagctaaaatataaatattcagaaagagccaggtgtggaaaactccagaggaagatcatagtaggcagaaggaagagagaaagcaaaagccctgaaatggcaagaagctggcatggtcagggaatcaaggagtccaccatgggtccagcacagtgtgtcaggtgagagtgcagagatgaggtctggggatacacaagacaaatctcagggtgcttgagaagtgtgagttagaaatgtggaagccatagaagagtgctgagaagaataacatcattgtcttatttttccttttgaaatataatttgtctgtgtctggattttagcagagggaatagcaggaccaggaacaaactatctgcaaagtttgtacaaatatccaagcctgacagggccatggacatgggtagtggagatggagatggctctggctgtgcattcagcatgttctgtagatataatcaataggacttggattgtattgggtggtaaggaaaatgaaaggtgagttctacatttagagctttaataactgaatatttaaactccaaatagatacagaatattggaagaatggcaggtttgggaggaagggacaagcaacagtttagtttgggcaatgttgggtttggagtgtctatgggactgcaggggagatatcaagaagtcaattggttatatgagactagagctcctggggaggccagtgctaataattcagatgagaggatagcatggtactttaagctgtgatactgaatgatatcacctatagaatgtgggacaccctaaatttagagacatttagagcagaaaactggactgaaaagaggtggccaattgagctgtaaagacaaccaagagtggattgtgtgtacatcttatcatcttatgatatggaaaaaaaatgtgtttgaagtaggagaaagagatccagtggttcctatgtcactggaacatcaggataaaaactgagaaaggtccactggatttggcagtctggaggtcatgtgtatccttaggagagtgcattagctggagtgctaaggactaaagtcaatatagaatggattcagcagaataggtgaggtgagaaaaaaaaagcaagcaattagagacaaccatttctaaagtttggctaggaattctctttacagaaaacacttctcttaaagaaatagggttgaagcttggaaagaaatatgggccaagattggtttctttttaaagggaagggataggataatggttacttggtaacaagaaggatctagtagaaatcaaatcttgagggtttctttttagcagaaagcagaaggacaaataccatttcttgggaagacgagagacagtgggatggaaagcaaatgtaaagagggaagtcactgggaaaaagaagtctttattcacaatagcaagggcacgtaaattgagggttaggaaagaaaaggctaaaaaatgcacatctaattgttacagttttctcattaaaattcagccaaggccatcagctgagagtggaatagtagaggaagttggttagtttgaggagaaagcagaagggctgaatgttattttaatgcatcagaaatcacacgtgctggagaagcacagatgctaacaaggaagtgccgagtttccattatagattacattccaatctgtaatcatacatccagttgtacctctcaataattgtgacattgaacaagtcacttcccctctctgagccatggtttcctatggattatacaagaacaatatttgtcccagagcaaggatgttgtaattagaaataataaaatacacattggttgatacacattgggattgcaccaaatagcagccctcataatcagtacaggtatcatctctggtccacggttctcttctccactttgtaactagggtggatccaaaattttacaacattgtcttgttggcctgtccccacctgtcactgcacattgttggaatgtgtcaacatttccaaatgacttagagattattgatacatcatactgtctgaatgtcttctaggatatttggagagtggtagagaaaatctgagtctgttgaggaactagggaatgggagagggttaaccatacaattctgttgaaatcagtctgattgagctccaactctggttctacccctttctgactgggggctttaaataattaatgtaaccaatataagtcaacttcctcatgtgtacaatggttatactaattaaaactaaggttagtcaatattcaccgtgtctcaaggtgtgctcagtgctcacacagattaacacgtctcatctgcagaggctgtgagagcagttgttagggttaaaggagaagctcttggcatgtgagtaatgttcataagtagtagccactattgctatgagcattgttcttgtcctgaccttgagcttcaaaaggcacgacccaggattgagccccatgacacagcacacagcctggtgaggaccagaagttcccatttgtcacagacactcagtctagcctagaagatttccatgtccagtctcacttaatcctcacctgaaagttagacttcaccacaaaactgtccttgttctgcagaggagaaaactgaggctcaaagagatatcactgaccaagaacccatattggcaaggtgccaacgataagagtagcgatctaactgaccccaaagcccagtgttctttactctgtaacagtgatgctcaactggggggagttttgcctcccacgggacctttgacaatgtctatagacactttcagttgtcactcctgaagggggagttgctactagcatcggtggatagaggccaggggtgttgctaaatatcctactgtgcacagaacagtcccccacaacaaagaattacacagccccaattgtctgtagtgccaacgttgagaaaccttgagctacattaaacaatgtcccatgaaagacctcagtgaaagtgactggtaatgacaggaagaaaagaaggaagagagaaagggaaaggaggaaaaaaccatgatactagggtatgaccacatgctggaaatatctggggaactcctttcaaatgcagcattttagagttgcaacggtagtggctctaaagttgctcatcctgaatttcaaatcttgctgcctccactgaccggctggacatgatgctgaaaaaaaaaaacctacaaaaaccccaaggccatgaattccctctggtacaaaaaggggtaatgatggctgcccacaatgttattatgagtattatttgtgaacaagtgctgtataattgctgttacttttagagaggctggatatcccaaggtaggaagagtctctaattttcctggccataaaaatcactgtagcttttacacagagagattctagagttgggttcatgaatatgcattttaacaaataccttggatgtttctgatacagcccacagaccacagtataagcaaatttggtcaagtggcaaagacacaagggacacagagacctttgggttgagttggatgcaacagcttcccatgtgacctggtgcagaggcagggactgtaattttgtgattctgtttcttaaaagcaaggaaatagatcccagaaagatgccaggatatcctcccatagtgttattgcccagaatttagtcatgtttccaccaataaagcaatcccttgcaaagcaaaaggaattctagttagaacaaattagaaaatcaagatatgcccgcaaagatggaggagggataccttcccccaaaagagtgagtaactgaacaaaattgcgatttgatttgcagagaagaaatgaggaacagttatttgtggggggagggggcatcaccagcaatatctgtcagaattgttgcatagagaaagggcttagaagtcagactaagctagattaaagatctttgtctactgtttcctacttaagtgaccagcagatttcacaattgctctcaacattgagtcattcctgtggaaactacaaacaatgaatattacagagctactatgcagaccaaactacaacccatatgtagcaattaacacagtgaatagtctctgataagaaccctacaaatactagctaaatattcatgctcattctgtttatcccacagaccttgaagatatacaacggatgctaagtagggacaatgaaaagcagacgggagaaagtaaatatagggccctctttgttgacttcatctagcacagaatctataggatgtaatatatttctgctctttttttttgtggggggaaatggaatctactctgacatccagactgaagtgcagtggcacgatcttggctcactgcaacctctgcctcccaggttcaagcaattctcctgcctcagcctcctaagtagctggagttacaggctcttgccaccacacctggctaatttttgcatttttagtagagatggagtttcaccatgttggccaggccagtctccaactcctgatctcaagtgatccactctcctcaacctcctaaagtgctggggttacaggcatgagtcaccacgcccggcctatagcatgtaatatatgtctatatattacaagtaatggttcaaaatcctcttcagctaactcaatccaaaccctaaaacttcaaattaaatatcaactaaaaaataggtcaagggtcctcacagtgggagggacaggagctgggagactgggagagcatggggccgaaagaagttgcagagcttgccagcatgtttgcattgagtgatggaggccacagatgtgaaccttctgactctgagtcttgtgccttcctcacgaagctgaagctgcctatgctcaattttccattgtccatacactctcagttcagtatttccgctggtggacagagccctttaatcctcttggtaatcagcttgataggtggcatgcatattaataatgatgggaatatagagaactatcgtttcccaaaggaactccgagagagtgccaattttatgttataaccattcacaaggctcactggggagggtctgctggtaggaggaggagctacagtggaagttaatgaatagttgtattgtaagatggtgtcacagctgagaaatggccattgctgaaatgtttcaggtgtgggaagatggaaaccaacttctccattcctctgaatgaaactgaggaggtgctccctgagcctgctggccacaccgttctgtggatcttctcattgctagtccacggagtcacctttgtcttcggggtcctgggcaatgggcttgtgatctgggtggctggattccggatgacacgcacagtcaacaccatctgttacctgaacctggccctagctgacttctctttcagtgccatcctaccattccgaatggtctcagtcgccatgagagaaaaatggccttttggctcattcctatgtaagttagttcatgttatgatagacatcaacctgtttgtcagtgtctacctgatcaccatcattgctctggaccgctgtatttgtgtcctgcatccagcctgggcccagaaccatcgcaccatgagtctggccaagagggtgatgacgggactctggattttcaccatagtccttaccttaccaaatttcatcttctggactacaataagtactacgaatggggacacatactgtattttcaactttgcattctggggtgacactgctgtagagaggttgaacgtgttcattaccatggccaaggtctttctgatcctccacttcattattggcttcagcgtgcctatgtccatcatcacagtctgctatgggatcatcgctgccaaaattcacagaaaccacatgattaaatccagccgtcccttacgtgtcttcgctgctgtggtggcttctttcttcatctgttggttcccttatgaactaattggcattctaatggcagtctggctcaaagagatgttgttaaatggcaaatacaaaatcattcttgtcctgattaacccaacaagctccttggccttttttaacagctgcctcaacccaattctctacgtctttatgggtcgtaacttccaagaaagactgattcgctctttgcccactagtttggagagggccctgactgaggtccctgactcagcccagaccagcaacacagacaccacttctgcttcacctcctgaggagacggagttacaagcaatgtgaggtcggggatatttttgggctctgtctctttctaccctgcgttaagcggaaaaaaaaaattctgacagtgtttttcttcctctttcataccaccaccaccacaatcatcaacataaaggaagtctgtaccaaatctgtagggggtttttcccacaaccaagcaatagacaccagctgggtgtcctacaattaaattccaacactatctacctggagctactgtcagatcccacaggtttaagggctcattccccaagtctgctcctccagttgagacacaagtcacaaatccaggcttctgaaacttcggaccaaccagcttcaatcagggttcccactaccccctctttgggggtagagtggctcatggaactcagagaaacatttatttcggcttgctggtttattataaaagcaaggtttattataaaagatactacaaaggatacagatgaagaggcacatagggcaaggtacggggttccacgccctccctgagtgcatcaccctctgggaacctccgtgtgttcacgtctcatgaagctctccaaatccagtcctcttgggtttttatggaagcttcatgatgtcagcattctttcctccagtgtataggatgggatcctctctggggagggtcttaagacccacaattagaaaggcaagggaagattagagtcctgctttggggtagatgaaaggaaaggagagagattctgtttcctgaggcttaatacacccaacattataacaaaggactgtagcaagggctatgggagttctgaagcagaaaccatgggctaaaaccaacatacatcttaataccagataccctaatcccagtcctaacttcatttaaccttggtcacattgagtcattccaggatgagtggctcaagtatttcctcagggaaaatacttctgtgccccctgatttgagggtaagaagtagataatgaggccactgtgggtgttattttttcatgtctggacctcagcctatatcctgagactaagtggaagtgggaaaagagtacaagagaagagacaaagtggggatatttgtaaggcttagatgagatagtgtttttttagaaaaaaactttatcttaccattaagtaaaatgtttgccataggctttctggggctttctctttttaaagtcagactgttgaaggtttcttctattcttatttgttaagagttttcttttattgtttaaatcatgaatgaatgttgaattttattaaatgcagtttctgtaaatattaacgtgatcatattatttttattctttcatttacataattataaattagattaagttttcaatgttaagctacccttgcatttatgaaataaaccacgcttgctcatgatggtttttgaacatttataatctgtctcacagatttgtttagaatttctgtatttatgtttatgtagagatggctctgttatttcacttttctctactgtccttgttagcttttacataaaacttagttttcctgaaaggagtttggaagtgattttctgattctatcctcgggtattatatctttgttaaacatttagaaaaatttgctagtgaagccaactggatcttgggtttgctttttgggaaggcttttaaatataggttcgatttctttaacaattattagacctggcagttttctttttcacattgttcacttttggtaaactgtgattttcaaattcaaggaatttggccatttcatcccaattaccaaacttttgtaatcacccagtgggttctccctgcctgctgcacagacaaaaccagtttactgagactgtagtattgcagtaaagaaagatgcagtattgcagtaaacatgatgctggccacatggatgaactggagttatcagtcaaatcagtttccctcaaggctgagagattatggtttttcaaagatagtttggtgggcaggagactagggaatgggtgctgctgactggttgggaaggcaatcataggagagtggaaagtggtcctcaagcactgagtctgccttggagtgagggggtcacaggaccacttgagtcataagtcatgagccctggtaaggtcagtcagttgctagaatgcaagtctgaaaaacatctcaaaagactaatcctaggttctacaatagaggtgttacctatagaagtgattggggaagtcacaaatcttggtctttactgcccaggtgtctctggccacatgacgtctggcaataaaggattatagaaactataatcctacattttagcagaattcagactccttgaataatcctaatcttagggcctttcattacttttcagtctcagagcaagaagggtgttagttagggaaggcctactatcatccttgcttccatgttaaactataaactaaattcttccccagttatcttagcctacaaccaggagtgaacaaagacagataacctttgaggctagaggcaggaaggagtcagccacgttagatttctctcactgtcaaaatttttgcaaatgtggtttcacttattggcatgagacagtataataactgtatggtacttgatatgtttctttcaagtaatgagaatgtaagctatctgagggcaggtattttggtctatattgtttgctgatggatcccaatcccctgcaaataagatagtgtctgatatgtgataggcactcaataaatgtttatggcattgataaacaataatatcacttaatgtccagtcaaaattatctccagccctcataatatgaatcaggtcaggtctagtaaattcccatcctcatgtccacagtatttgtaaattcccagctggcttacattttcatgaacatttctgattttgagtttctgcttaagtaaactactctggttaaccattgcctaaagacttcatatttaaataaataactcataactcagccctttaccttgctttctgcacataaacactcagaaattgtcaattctgtattgtgaacatactttcctgatgcactggcaaaagacaccactcaacatgaatatcaggcaatcctgttatcagtgttctcactcaccccactgctttactcattttcttctccttttcccttctgtctctcctaaagttattgcatttccaaggcagagcactttgcgcatttcatttgcacgtttgactcctataaatgctttagagttcccaggaggtgtatattcttaaatgcccagccaaggtgtagccatagaaaataaggaacaaggctgggcatgatggctgactccagtaatcccagcactttgggaggccgaggtgagtggatcatttgaggtcaagagttctagaccagcctggccaacatgttgaaacgctgtctgtactaaaaatacaaaaattatctgggcatggtggtgtgcacctataatcccagctacttggaagactgaggaaggagaattgtttgaacctgggaggtgaaggttgcaatgagctgagaatgtgccactgcactctagcctgggagacagagaaagattccatctcaaaaaaaaaaaaaggagaagaaaaagaaaaagaaaataaaaaggcacaaggacaaaacctagataggagagccagggcttccagatgggctaattaagagacttcctccactgccaggacaggggattcttactattccttcccactggccttggttaattgcagtagaacagtgcctgctacatcctctccatttttcttttcctctttaggagttttcattgtggagtctcaattcccattgcattatgatatattgtgggttcaggaaactgagattttttttttaaagttatgggacagttaccacaaagaaatacttcccaatgtatgtccatgtggatggctcactaacttcctgtatcaggcctggtcggtctgggacagcactactgcttgctggttttagattttttgttgctttgtgcaacttagtactgctgttgtcaggtgttgccttggggactctccagaaactctggtgaatatagacagctctctgagccttcaggctcccctgcagctcctggagggcaggtttcattgtaatgaggatgtttcgctatgaacagtagtcactctttctctaatcaggcccctggtgacaggccactacttgagggcacgttgtcccttgagctatatatgctgctcttgttacatggggtcttggtagtagtctggcctgtactgggtataagttgcaaagtcctggtctccagccagagtgagctggccagtatggtgaaactctatgtccatctctgccagggtccaacctggccgaatgacagatgaaaaatgcactctgagactgatatccagtgaaaaagcaggctaggggactgggcagctcacagacaccgaggagggagctgtaaagagtcagtagccacagccccgacaagctggcactgtgggcatttattcagtacagatttaatgacaaaggcctggagtcaacacgtcttgtgggtaattaacattgtcaccccccaccccccaagacagcagtcctgtgcacagatgattaaataccaggttccgaggcctaagtaaactaacttatctagatcaattcctttacacttccttgttatccattctgagaaaattcagctgccttcagccaaatcctcttctgaagctatgcaaatcccaggccttccaagaaggtttgcatccttttcctataatttatcttacaacttttcccaccatcctgaccgatctcctacacatctcactgatgagagagccacaggataccaggctcctgggtagcagcaattccctcatagtgaagtcagaaaagatgataaaatgctgggcttcagtgtgttgataaaggagagccaggatgaaaggatcaagtcacctaagcctaacctgtaatatggcaactgcacaagtccccttggcaattttcaagagcaagtgctgctgaggccagtgcctccttggttgctgcattccttcctgctatcactccttgtccccactagccactcagaggtcaagtggggcaccttcaaaagggaaacaactgcccacaaggccagtgcaaatggagctcacccccagatgtttttagtaacaatttgtaaagtcaaaacaacagggtgccaaacccaaggtcatctagattttctcctgttatcttctaggagttttataattttgtcttttacatttaggtctgtgatccattttgagtcctatttatctggtggaaacctgactgacatagcatatgcttctagtgtttaaaaaaaaaaaaaaaaacagaggaaagatgaagcattaactaatataaattagtagaaattgagtggaagaaatgaaaatagtctctctgtctactttatcatgccattttctttttgtgtttttgccatcagcatatacatctgttctctaatctactaactgaaaacataaaaaccttttgtaccacacgcgtcctcctgaactttacaacaaatttctctgctctccttgacagcaaactcaagggtcacttccagtttctttctctacttcctcatttcacattttctccagaactcattctaaatgggttcatgtcctgattactgcagtgggactactcttatcaaggacaacagtgacatccattgccatgttactgcactgcaggttcagacatttggtgcttgcctatgaatccaatggagtaaatctaagtcatatatgcttatctgataatgatgggaatcttaggcccctaagcatatatgactcagttgtccacacccttttattttaaaatatataattctcttggtgacatcacacttgtttggttttcttcctacctcagtgatttatctttctcaatctccttgactggctcttttctgacttttaaatgttggtgtacccgagggctcaattctagacccccctcatctatttgcatcaatgcagtcatcctaggtaatgtgttcctataacttgaaatcccatctgtacataaatgactccccctaaacatccatcataatccacaacttctcttcaggactccagactggtatctacctccctcctctgcatttccacttgaaaacctatggggcatcatcaaagtaaaactatcaatttgattccccctgaaacagttgcttgacaaatcttctacatttcttccaaatttaggaaaagtcatcacactctaccaaatgtcttaagtcccaaatataagtaattattgattctttattttatttatttattttttatgagatggagtctcactctgttgtccaggctggagtgctgtggtgcgatcttcactcaccgcaacctctgcctccaaggttcaagcaattatcctgcttcagcctcctaagtagttggggttacaaggttcatgccaccccgcctggctaatatttgtatttttagtagagatggggtttcaccatgttggccaggctggtctcaaactcctgatctcaagtgatccacctgccttggcctcccaaagtgcaaggattacaagcatgagccactgcacccggcctattgattcttttaatctaatccatcaccatatcccattgactctatgtcaaaaacgtggaccaaatctgtgtgtttctttcctgtccactaccacctgacttcaaaccatcatcatccggaccactacaatagtttcctaatctttctgcattcactcttgctctacagcaatcagttatttacacagcagccaaagttttttttttctaatataaacatgatcgtgcccatctcttgattaacaccctccaatagcttcccatcatgctaataataaaaacatctgaatccactatctgactcccaaagcctcatattatctggcttttgcctgtccttctgatggtcttcctcaacagtttttctttcatcgattatgttagtaattacactagtaatatctttatttctcaaacataccaaatcattcttgtctcagaatctttgtactaactgttgtcctgcttggaatattcttcctcttgaactttcatgtgaccagttcatgtaattctaatctcagtttaaacataacctcctcagaacatttttttctgagtccctaagataacgtagcctctcaggctctctccagtctagttcagcaaatattttagttcttttcatagcacttgttgtagctttttgtcaatcacaaaatcacctcccttctctcattctttgctggtctgagagcctttgacgcctctgtttttcttcatctattgtagcagcctccacattcatctgtcatttttcagtgagaaagagagtgggtatccagaaaatgaggtctgaaccatatacagcagagtttgttaagcctgaggtagacacctggtagccattaaaagatacagagcaatgtgatgatctgctctatttttttttaatttgtattgagtctaaagcttaaccataattttctttttttatttttattttttatttttttgagacaaggtcttactctgtttcccaggctagagtgcagtggtgcaatctcagctcactgcagcctctgccccctgggctcaagtgatcctcctgcctcagcctcccaagtagctgggactggaggtgcaaaccaccatgcctggctaatcaaccataaaaatttttcatttttatgaagtccaacttattccttttttacagattgtgcttttggtgtcatgtcaaagaattctttggttagctcttggtcctggacattttttaatgttttctcctaaaaatgtagtagttctacatttaatatttaaatctataatccatctttaattatcttttgcaaagaatgtgaggcttaggttgagtttcttttttgttaatatttttaatgtccaattacgccagtatcatttgttgaaaataatattctttcttcattgaattttttacgtatgtcaaaagtcaatattgtgtgtggatctatttccggactctattgtgttccattggtctgtctaccgtttagccaatatcacactgtcttgataattgtagcttaatagcaagtcttgacatactccaatgttgttccttttcaaaagtaatttggctattttagttcctttgcctttcgatataaatttttagaattaggttaatgtttttttaacttgaatcacattgaatctatggatttgcttgaagaagaactgatgtcttaatcatattctgtctgcagtactctcttattcagtactaatctttcaactctatctgccttgttcttcccaactcccaactttatcttcttatttcaaagagtctaccgggctctacctgtgtttcccctcctactctgtggcctgggaactctctcaagtcagtaatcaaggcaatcacgggaatcatcttatttgtttccccttttttggagattacaatgctatactacctgttgtccagtgtcagaaaaccattctttcccattttccctagatttttagttgtttaaggtaggagcataaatctggtctctcttatgccatcaccgctggaagtagttatgttgattgtgttttaaaaagtcattttttgcttctgttcatggagagagagagctgtttgcaaaagctagttcaggcatccagacaagagatggcatgagcctgtaggtgattcttggggtgcataaaatcagcagcacttggattttgcttaccaaatgagagaaaaatcaataataaattttagacttggcacttaatctactgagaggacaatgcctctgattcctaaaagaaagaaaactgaggaaggggcaggtcagggaataggagaactggggatactgttttcagaatgtttagtttgtcatgcctactgcttgtgttcacagaaattccaagaagttgactgattttatgaggctggaattttgggaagtggtcagggctgatggtttagattaacagttaggggtacaatatatttttttcttttagttttagttcacatcgtaattgtacatgtttaagggatacagagtgatatgttgatacatgcatacaatgtgtataatagtcaaatcagggtaattagcacatccatcacctaaaacatttatcatttctctatgtggtgaagattcaaaatcctctcctctagcttttcaaaaacacacaatagatttttttttttctagccacttatgtagctacaaaaatagtactggagtaggggcagggtcttgctctgtcacccaggctggagtgcagtggcacaatcatagctcactgcagccttaaaaccctgggctcaagtgatcctccacctcagtctctggagtagctgaggcatgtgcagccacactccttttatttatttatttgttttgtggaaacaaggtcacactatgttgcccaggcaaactcctggcctcaagatacagagaattaaaaagcacaatcaagtaacctaactgacatttataaaccatttcttacacctaagagtaggatatttcacataatacccaatataattcttttcaagtgctgggttataaaataagttttaataaaaatctaaggctttaaattatactaagtatattccatgaccataatctatcaaattaaaaaccagcaataacaacataactagcaaatgcccaaatctttggaaactaaacaacatatatgtaaataacccatgggccaaataaatcttaatgaagattagaaaatatttttaactgaaggataagaggagtacatttcaaattttgtgatttaaagctaaagacagtgtgcacacgatttttttttttaagacagggtcttgctctgtcactcaagctgcagtgaagtggcagaatcacggctcactgcagcttcaacctcttgggctcaagcaatcctcctgcctcagcctcctgaatggctgaggttataggcactcaccaccacatctggctaatttttaaatttttttgtagaggtggggtcttgctatgttgtccagactgctcttgaactcctggcctcaagcaatcatccaacctgagcctcccttacaggggaatttttaccttaagtgtttttattagagaataagtgtgtgaactcaatgatctaagtttacatttcaagaagctagaaaaatatcaaattaaatctaaagaaaatataagaaaataacttttaaaagtggaaataaatgaaatagagatcaatagaagaggaaatattaaagttatgttaagatatcaataaaatggataagtttctagcaatactaatcaagaaaaaagagaaaatacaaatgaccaatcttaggaatgaaaaaaggaacattattacagagactaaacacactaaaatgatattacaaatcactttataacattatatttgacaatttagatgaaatggacaaattccttgaaaagcacacatatgaaactgtcataaaaagaattagaaaatctaaatagtccaatacctagtaaagaaattgaatttctaatcaatacccattaaaaaaaaaaaaaacttcaggcttgcattgtttcacctgtgaattctactgaatatttaagaaagaagtaacatcagtcttacaagaaacacttccaaaagacagggaaaaaaggaacacttactagtttacttttaaatacatctgttcaatacaaaaattgtgcttgaagaataaagtgatttttatgaactgaagttaaaattaatattaataaattttttattttaaccaatatttcagaaaagttatgttttcactgacatggccagacataactgaaatcagtatctttttttttgagacagtcttgctctgttccccaggctggagtgcaatggcacgatctcggctcactgcaacctccgcctccctggttcaagcaattctcctgtctcagcctcctgagtagctcgaatcacagatgcctgccaccacgcccagctaatttttgtatttttagtagagatggggtttcaccatgttggtcaggctggtcttgaactactgacctcaggtgatccacctgccttggcctcccaaagtgctgggattacaggcgtgagccaccgcacccgaccttgaaatcaatatcttaagtaatgtttggatcatgcaattttaaagtgacacatactttacacattagtggttttaaaaagtttttctcacattgatgtcatggcaataaatggaagaaaaaaatacctagttcttgaaaacaataataaaaacctttgtttctaatgattactcatcatgtggaaatttgcagtgaaaccaaaatgaagccaagtaatttaatttctactcttcaaaaatctctgtatgtagtatttctggagtatctgactagtataataaggtttttttgcctttattgtcagacacttcattaaatcttaaggtggtaaaaacagtgtgaaatcatcataaaatcttaccattcaaataaatgtacttatgttttacactttttgaaatagatattctgacgggggtaagataatatctcattgtggttttgatttgcatttctctgacgatttgtgatgtttggcttttttaatgtacctgttggccatttctatgtcttcttctgaaaaacgtctattcatgtcctttgcttacgttttaatggaattaccagttctgttgttgtttccacacgaacattttcagatgaacattcattgagattttattcataaaagtcaaacctggaagtaactcagatgtctgtcaactggtgagtggatacactatagcatatctgtatgatggaatgttagagttaaaaaggaattgctaataaatgcaacaacattgtgaacaaaagttcctgaaaagggctgggtgcagtagctcacgcctgtaataccagcactttgggaggctgcggcgggtggatcacctgaggtcaggagttcaagaccagcataggcaacatggtgaaatccagtctctactaaaaatacaaaaattatacgggcatggtggcacgcacctgtaatcccagctacttgggaggcagaggcaggagaactgcttgaacccaggaggcagaggttgcagtgagcccagagggcgccactgcaccccagcctgggtgacagagtgagactctgtctcaaaaaaaaaaaaaaaagaaaagaaaagaaaaaattatctgaaaaggaatgtgaaggaaacagactttattccagcaaaaggctgcaaactacagaaacacaatctttgttgtaaaatgaaggtgtgttccagggaacagagggaaggctccggttttaaagcaaaagtttctgcccaggttccctatcacctatgttgctatcacctatgttgatgccaagaaagagtgaaacttacttagttcttattggttaacacagctcagtcctgattggttgatacagctgagcgctgattggccagggaaggtgaactctgattggttgcttcaggtgagctctgattggttggtttccaagccccaaaattaaaaggtgtgagttttgaggggacttagagtacctgtatgacctctagacagcaaatggctggtaggttctattttaaatttaagcccaagtaaccatacaggatccatcccaaaagactggctctttcaaattcacatttgttcacaacatgaatgcatctcaaaagcattatgctaagtgcacaaagtcagacacaaaaaactatctcttatataattccatatgtgtgacgttctagattacaaataactatagtaacagaaatgaggtgagtggctgtcagggaacaggaggtggggaaaggggatcaataattgcaaaggggcacaaaaaaactttggagtcaatataaatatctattttcagatgatggttacatgataatatttatagtccattttcatttataagtatagctacaaaaatcctaaataaaatattagcaaaccatatcccaaaatatatagaaaaatattgtactatgactaagttgcatttattacagaagtgcaaaggaactgatttatgccaaccacctgactgagcttggagccagcttcttcccccatcttcagataaaaacccagcccagatgacaccttggtttgattttgaccttgagatcctatgcagaacattcagccaaacgcattcagatgcctgacctacagagctatgagctaaaacatgagtgttgtttcacactgctaaatttgtagtcatttctacatagcaacagagaacaaatacaaatattataatactatttataaaacttaaaaatctaaatattgagttctttaggtatccacatataagtgcatatttctaaaaatcaaggaaatcacatacacaattctagatggaaatttttagcggggtgggagtattggaatgattaggcaaatacacgattgatgcaaagatgggacagaaatgaaagactgtcattagcatattatcaaacattacctttattaagcaaaaaaagccaatggttaaatatgcatttaaatgtttaattagaaactaaattattcgttgtgcacatgtaccctagaacttaaagtataataaaaaatttttttttaaaatagccattctccctggtataagagggttaaaaaaagaaactaaatttttatatttattatataattatataaatatttatatataagtataaacataaatatatataaatttatattaaattaaatagaatttaattttaaatttaatttaaaagtttaaatatgcgtttaacctgatctgctttatgtatttaagaaaatgaaatatccatactatgcagttcaatttaataacatagtacaaaagataagtttggtatagatggtaaattgtagatgcttttactattactgcctggttttttatttacaagcatgtaacaatttttgtaataaataattgttgtaaggagatctttatttaaaatcctcagaagttttcaaatatgtactcaaagataaattcatataggaaaacgaactatatgaaagcagaaaaggaaaagttaattagataattaaaattgccacagaaaggtatatatttgaataataataaaagaacatttctcaattatctactataaaccaggcactttgctagcatttcaggcacaccattccaataatcttcaaaagaaatttgcaaaggagataccatcattttttcctaacagtaaaacttacagcatttcaataccttgcccaaagtcatgcagacagtaaatagcaaaatcggcataaagaatcaggactaaaatgttatttcaaaggattcatcaagaaataaattatgttagccaggcgtggttgagcatgcctttagtcctagttactcagcaggccgagacaggaggatcacttgagcccaggaggttgaggctgcagtaagctatgatcacccctctgcactccagcctgggtgacagagcaagactctttctctaatgattaaacataataataataagaagaaattacacacacatacccatacacatataccaagtatttatgacacaattttaataattgctgaatctaggtgatgggtacacaggtgaccaccatgttgctattccttcagtgtacttgaaaggtttcagtatgaaatgttgggaaatatggttgggtacttagtacagcacccaaatccctggcatctgaagcaatgaagtacctccttccccagcccttcccatcaccgatagccataatggcccccaactccgcatcgcttgctcgcttttcctggttccccagacaccgacttccactcgacgctgaggatgctccaatccagaccacagaagccctcagtggctaacccccagcttcagattccactgaccattccctgaagccttcttacaccgcaaacctccacaagtaccccatgctggtcgcatccggtcaaggaccccaacagcgctgggaaactcaccctacagctggagtcgcacaaacattcgcttgaggactagcaggtttccgtaacctcttcactcactgccgtagtcacgctcttgtgcagactcagtagcaccttcgcggaacacaagatgtctacagactttgaaaccaggcgtgcacatggaagcagcagtcttggaagatgcttcttacagatagcgagatggccattttctggcgactaaattccatcgtgctagaaaggaaagaggcaatgcagctgatcttctactgtccttttcaccacttccccagctgctaccagcagcgttgtgcattctcaggaacaacattcagcgttctcacctgtctacttcaaatctagcaacagccctaagccaatcacagacaagacctaagcagaagatggctgcacctatttagccccataggcccttaaagcagcaggtaaggcgcagccatatttgaaaaagttttgggatctgttgatcaaagactaggcagtggagcaaggaagtgggagcaggcagagggtggattctgggaatgtgtttgtcgagagaagtcttaggaaaccagaattgggtctggaggagctcaggtagtaagggggaagccacctgggtacatttgggtgtgggattgtggagagagaccttgaggggtaagaactgggccaaactggttgtggagcagacactgacaaccacaacccattccaagagaatattagttgtacttcagaaagatcatgtgtattctgaacagtcatgtgaaatagatgtaaaagtcatgaagaaattattagcaatcaaatctagcattatatgaaaagaatgaacttcaagatcaggttcccaggaatacaaggatgttttatcccttaaaaataaatacatgtaatgtatggtgccagccatgattaagtaagccccctagtttatcactcccactggttagagttaaaacttttgaaaaaaaactaataaaaactacttgagaacttttaaaatgaataattgcaaagagattggagaataaagtatagagttgaaaaccaagcaatgcacagagtaagttccctcattttttttctgtctatatctcctgcctttgacctaagggtaagacaaattaggaaattgttagtccaaactgcaccattttggaagccccccaccatttcacaaaacctgatcaaagtgaaacattccacagggggttcgggctgtgagaaacatcctgcctcttatcatattctgctgggagaaagtgcaaggaacaccactttccgcgggaatcgcctcatcctgggaacatgtccccccaggcccctctcacccaggcctataaattgccccagcctataagcggtgggcactggcattaggctgtttcctcacttctgcaggtcttatgctggacataaagcctgcatttgctgtagagccaccactccatgtctttctttaacccttgccttcccttcaaaacctaacagaaatttcgctgctgaggtgaagagcaaggacactaagaaaaaccagccttcatggccagaaaacagagaaaatgaatccacatgagccaaaaagtgtgttgtggggatctctattttattttattttttccgtttttctagtttttctagcatggtcttgctagttctactgttgaaactgcactgccacagtactggcagtgacatggacacctaaaactcaagaaaaaaaatctatagatagaaaatattaggcccgatgcggtggctcatgcctgtaatctcagcactttggggggccaaggcgggtggatcacctggggtcaggagtttgaggccaggctggccaacatggtgaaacctcatctgtactaaaaatacaaaaattagccaggcatggtggcaggcacctgtaatcccacctacttgggaggctgaggcaggagaatcagttgaatctttctgatgccaatcataagcttgccacattagttctagagaataacaaacaaaaaacaatgaattctaccattatcatgaaatggagagggatggaatctcaagttcatatacaagaaaaattcagaaagtgatctgcagatacacagtgtaagtctgagacattcaataaaagaaatatataataggcttgaaggacacaggtgtcatcaaacttggaaaagattctaggaatatttgaaagcatactagaagaggtctataaatattggtaggaggtgaagggtggttgtatctaataggctgcaaaagaaaagtgactaagcaaaaaggcaagggccaaataggcaagaatctcaaccagagggagaaagagaggcacatctcctatgagtcatacatagaaatatagtgctatggtctgatgtgtcccccaaaactcatctgctagaaagttaatcctcagtgcagcagtgacagggaagtggggcctaatgggaggtgtctaggtcatgagggctccacctcatgagcaagttaatgccatgataaaaaggccttgtgggagtgggtttgctactttttgctctcctgccatatgagaacccaacattcatccttacttgccgttctattatctgccatgtgaggatgctgcaaaaaggccctcagcagataccagatactggtaccctgatcttggacttcccagcctgcagaactgtgagaaataaatttcaattatttataaattaccctgtctcaagtattttgttatagcagcacaagtggactatgacagatagtaagaggaggagaaattgttcatattgaagacctcttttcacttatactctaagtcacccttaaaggttcacagaccatgagaaaatgtattaaaataacaagggtgccaacccatcaatggccaactagtactttggttccactaactcccatcgcattggtttcactcacctggactgcaccaacttgggaattctctctctactattccttgttcttctttccccaactggaatattgcttctggcttggtagcttgacaacctgtcaagaggtaatcacagagaatctgagcagcattagagcttgtgagaaaaagttctgtttcaggaaatgcacagtatacatctcagcagaacagaaacctttcatttggaaagtgaaattacatatggtcactgtacgattataaagtaaaaaaagttctaaaagtcaaagtccaaaatcattgaggatatcagagtacccacaaattgtggcaatagaaaaaaaggcaattaatcggcttacagtgagatatttaggaaagttgtctttacccagtgacactaggttgttgtaattttccaacatcacatcctggtagaggttcttctgaacagggtctaatagattccactcctcccaggtgaagtcaacagccacatcattgaatgatgataaaccctataataacataatccttttaaattctggagttaatataataaaattcagtctataagactcgtaggacattattctctttatctttaccacaaagattcacaaacgaagattttcctgtgcctagttttggtttgcactttgtgagtggaatacattaaaaactatcttttctttgtgcattcttcattcacttgtttactctttcattcatttgcccgatgtaaagtgtcttttaaacctttaaactacctaaaaaccatctgtaacccaccttaggagcatttaatgtaattcattatacatattacaataaaaacaataaaggttagtccttccttcaagtgtttctgatcttgcacagagtagcaaatacagtcctatgcagaaagcctatgtattgcatggtattatggattagcaaggactaagacagaagtatgctcaagctaatatgtgagcacaattaggtaaggccataattgttctgaagaggtagacaagctggtagcatgattagtagtgcgttctaaaggaagaagtggaagaaatgggggcttccttggaagggggcaacatatgtatctgtattaaataccattctgcgttcaaagaaatgcaaatagttcattaagacaggagaagctgaagagaagaaatgcccatttgaaaagcaggaacatgtcttggagcaaagggtacacatttccttaagatactcgatagccactacacttttttttttttttttttttttacataagtaagttacggtcagaattgcattttggaaattgtgctacaaattaaatgatgatactcataaagaaaaacagacttcttactatgtgctatgtatcattctacaaattttacatatattaacataataatctgcacaataacccttgtttaagcactattatgttctttttataaagaagagattttaagtttcctagctgtgccttttatatctcccacatttccttaaagattactgttcactgggtccatatgctggcacacaaaaactgaagaggaagaggaagatccatcagagacatttcttcacactggatgcccaggaaatatttactgatatcaacgattttatgtgctttctccttctggacaaagtaaatcttgtaacttttaaaaattctcttgtgatggttgtcagtactgccacaaaaatgtttgcaacttaattctagatcctgctacttatatggcaattgtctaattattagcacctttcaggaccctacgacatggagatagatctcccttcctaactggctactcttgatcatttattctgtctcctagtctaaccacatccctgccagccagagtgtacttatattcatttttctctttgattacatatatggttataaacttctaaaaatctactgggaagtaaataaacacctcacttggaactttgtcatgttcaagagctttcagaagatggccagtacttttagtatctgtttgtcctgcaattctgataatgtctcatcaagggtatcctcaacaaagatgaatttctggacatgagatatacttttttcctttacaggagctgcctcattctaagaagtcagcatctatgaattcaaacaaaaatgtgttttaaagtagaaataataaagagcaagtccgcgtaaataaaaagacttttctttttaaaattaattcatttcctatacctaacaaataaaattgtatgtatttatcagtacaatacgttgttttgaaataagtatatactgtggaatggctaaatcaaactaattaacatatgtattacttcacatacttgccatatttttgtggtgtgaacacttgaaatctattctcttaagcaattttcaagagtacaatacttggccgggcacggtggctcacacctgtaatcccagcactttgggaggcagaggcaggcggatcacctgaggtcggagtttgagaccagcctgatcaacatggagaaacccggtcactactaaaaataccaaattatccgtggtggtgtatgcctgtaatcccagctacccgggaggctgaggcaggagaatcgcttgaacccgggaggtggaggttatggtcagcgaagattgcaccattgcactccaacctgggcaacaagagcaaaactctgcctcaaaaaaaaaaagaaaagaaataatacaataccttgttatttactacagtcaccatgttgtacaatagatctcttaaacataaaagttcatgtcttatctaactgaaattttttattctttcaccaacatttccacaaccctctccctcccccagccttggtaaccaccattctactctccatttctatgaattcaataattttagatttcacacataagtgagatcatgcaatatttgtctttctctgtgaggcttatttcacttaacataatgtattccaagttcatctatgttgtcaccaagtgacaggatttccttcttttttgtggctcaagagtattccattgtgtatatatgccacgttttcttcattcattgttgttggacacctaggttgattacctctcttggctattgtgaataacactgcaatgaacatgggagtgcagctatatctgcaaagtgctgatttcatttcctttcgatatgtgcccagtagtaggattgctgcattatatggtggttctatttttttttttttgagacagagtcttgctctgttgtccaggctggagtgcagtggcactgtcatggctgactgcagccccaacctcccaagctcaagcaatcctcccacctcagcctcctgagtagttgggactacatgtgtgtccagctaattagtccaccatgcccagctaattttttatttctaaaaacaaataaatttttatttgagaccagcctgtataacacagtgagttcttgtctctataagaaataaaaggtatacatttgcataataatagctaccttttgtcaagtatctattaatacgtatttgcagatgagtcactggaaggtaactagggttagatgaggtcatgagggtgggccttcaatatggaattagtgaccttaaaagaagagatattggctgggtgccatggctaatacctgtaatgccaactctttgggaggccgaggccggtggatcacttgaggccaggagtttgagaccagcctggccaatatagcaaaaccgtgtctctactaaaaatacagaaaattagccaggtgtggtgcaaacgcctgtaatcactgctacttgggaggctaaggaatgagaatcacttgaacccgggaggcagaggttgcagtgagccgagatcgcgccactgcactccagcctgggccacagagcgagactccatctcaaaaaaaaaacaagaagagaatttgcattctccccctactgccatatgaaaacagatggccatctgcaaaccagaaaaagatctctcaccaaaactcatcccacactggcactgtgatcacggacttccagcttccagaactataagaaaacaagtttctcttgtttaagccactcagtctatggtattttgttatggcagcccaagctgactaatacattacatgccagcactttgtcagggacttcaaatgcactacctcactcaatcctcaaaacccatctgcaaggtagatattttcaatttgtcataatggaaaaactgagacttacagaagttgggtatcttgcccaaagtcacacaaaatagggtagaattgacataaaaagctagtactaatttcaagtgtatacaaacactcgtgtacgcacacacatgcacacacatagcatttatgacacgattttgacaactcatgaattttggttgtacaggttatcatattgctattctttcgagttttctatatacttgaaattcttcgacataagatattgggaaatataatacctcaatgtaaaatacagcacccaaatgtctgtacagctgaggcctccttatgttccagccccaccagcctctcccgtcgatgtccgtgttgctctccacccaagcatcttgctgttgcctcactcacacctccccagacacctactttcaagtggagcataaaacggaccctccaaatactcaaacttggacccctgaaacctcagatcactaaccgccaatccctgtcctcgccgaccacatcctgacggccccctccatcggtggctctcccaggcctctctctctgtggcagggagcacgatgaggagaggatatttcacgagaaacgagagaatggtctctagtttcttcctcaatccacagctctaaacactgatgccggccctaaaagccctcaacaaccccgaagcggccttaaacggcaaccccagatggtactcatcagaaaccaatcccaagtcacggaattcccacagcgctgcgggattcctaagggctttaggcagagtcaaatgtaatctcacacaggagtcccgtgaatttactccctggaaggcaaagcttccatacgtcatttcctcttctgctcactgggctggatggccaggctttccagctattatacaaactcagtagcactttggaaggccaggatccatctacagacgcggatcccggtcccaccaggaatgatcgctcagcaatatggtcgcgcccaagccctgacatgctgttggaagccaccatcttggaagacgcagtacagactgcgagacagccattctaggcgaccggattccgctgaccaggccgaaaaggagtaaatctaactgatcctttctaatcttctaaagacctctcatcctgtacttccaccttctttcctgtcagcgtagggcatgcttagtaggatttcggcactttcaactagtcttccgacctgaccaatcagaacacaccgaaacagaaaatggctgcgcccacgctgcctcgttcttctaaaccacacgaaaggtgaggccgtattgaaaagcctgggtccctaggggaaagaagggagggagaattaggaagcttgtacagctaagacgcggaagacgctgggaatatacccaaaggaaatgaaatcactatgtggaagaggtatctgtactcccacatttactgaagcattattcacaatacccaagatatggaatctttctccatacgactgagaaagatggagattaggagacctagaactggatctggacgaacagaggtggtatgggaagagctctctggatgtgtggtttgtggggagagatggtgagggcttaagaactaatgtaaagatgcctgtggagcagacacgggcaaccacaatccaggccacaagaaaagcatttgtagctcacagggatcctgtgtatcttgaagagcacaacccacccagacatttgtcaatactgtgatgcaggagtcaacttccttttttccctggctagataattatcccaacaacattatttaaagttgatctcttccccaatttgctaatattttgtaaggagttgtacatctaagttcatgggatatttggtctgtaattatcttttattttaataatgcctctgtctagttttggtgtcaagattatattgcctttagataatgagctggaaaaaaatcatctttttgatgtatgtagttctaaaccatttttttgttttaatattccattgtatgaatctgttttctgcactgacacattcaacacaattgccaagctgttacccccttttaaaatatgtgcacattttctgtctcttttattatataaaaacttgaactatttccacagtttggggaaggaaactatacacaggtctttctgtgtcattacctactcttctccaatggagaaagggtaagtttaacaaaataggttgcgcatacaaaacaggttgtgcatggatggtttataacacttcctttttctatgttctttgtgtttgggttaacctgtctgcaggatgaagatttgctcttcagaatacatttgctatgttctgaatgtgtcccctaaaattcatgtgttgagaccttaattcccagtgcaatggtgttgggaagtgaggcttaatggaaggcgtttcgttcatgagaattctactttcataccacttgtaaaaggacttacaggagtaggttcacccccttctgccttttgccatgtgaggacacagcaagaaatcttcaccagatgtcagcaccttgatcttagactccctgcccactacagaactgtgagcaactacatttctgttcttcataaattatccagtctcaagcattttgttatagcagtacaaataaagacaacgctgttaaggaaacgatactggaaccctcatacactgttagtaacattcaaaaatggtaccacttcttcgaaaaagtttggccactttttatgttaaacaagcaatctaactattaagcatttacccaaaagaaatgagaagttattcaaaatagtgaaaaacccagatgcctatcaactggtgcagataaacctattccagtttacttatacaatggaatactattcgtcaacaaaagaacaaactactgacatatacagcaacatgaatgaagttccattttattatgctaagtgtaaaaaggtagactcaaaatgttatgtgctgtatcattcttttaataacactatggaaaagacaaaattagacagagaactgatttgttctctgttctggggatggggagagaagggttgactaaaatggacagaaggagggatttttgggcggtggtggaacttatgaagtaaagcactaatcttctccaaagagaggtttggcccttgctctcaactcctgggagatgacctctaagcctctgaaatttcctgcttgggaagagtatctttgtttacctggttgccttgggccatgccagatatgctaacaatatgttttatgatgggggcccttaggccatgcggtatgaactccacctgtgcagactatggtcacccatgtggatagtcaatcacgtctatgtgattgaacccaagtaaaatatctggacaccaaggtttgggcaaacttcccttattggcattattctgcatattgtcgcaaattgtttctgaaagaaataggtgctgcctgcatgatttctctgaaagaagacaactgggagctctgtgcttggtgtccactggaccctaccctatgcagttcatccctctactgactttgttctgtagcctcctgctgtaatatactgtacctgtgggtataatgccttttctgagtcttgtgagtaaattattaaacctgagggtagtgtttaaactttgaagttggtgtcagaaatgagagtaatcatgggtatccccaaatttacagttggtattattataaaaagtgatattggggaacactgaacttgcagctggtgtcagaagtgaagatggtcttggggactcccaaattacaaaactgttttgcaccataatcatggtggtaacatgattctatttgtcaaaagtcatagaactgtagaccaaatcagtgagcattaccatatgtaaactagtaaacaaataaaaaatttaaagatacaaaacattgtgtatagtacggtgtagttagtaagttgaaggtgatttttacttttgtttaggataagcatataattttgtgataaaaataagagatcaccatttaaaattatggaaagttctcaaatctatactcaaattcatataagatttaggatatacatttagaagaaagttaaatcagaaatggcataattacaatctttataaggtatcagaaatgaggataaatatttgaaaaatagctaccattggtcaaataccaattataagccagtcattttgccaggcatttcagataccccatcttattacttcttcaaaacaaacttgacaagtagatatcatttttcttttcctaatggaaaagctgaaacttgtaagagtctgtgtaccttgccaaagttcacacagccaatgagtagcagaaatagattaaaaattaatcttactttcaaatagctcagtaggaaaaaaagtacagatacacacatacaaatatacattaagtatttataaaacagtgtaaataattgttgaatatgtaagtggtgggttactattctttcaactttcccatacgttgaaaattcatattgcacccaaacttctctcctgagtcctaactactaagctcatcagccatctcctagcactgacacccataatgcccccatatccccacacctcacatttgctcctgttcacaactccccagacaccttatttcacacagaccctaacacagactcttcaactcctcaaacccaaaatacagacagaagccccagatgaccaagccagcagcctatgctctcaaagaccattccctgaaagctagtgggtctcccaatgccaagatctggagccgccctgtcactgccccaggaaacaacccttacgtctgtcattccttttccacccacaaggtattcttgtaaacacaatgatgtctttaggacattcgccccagacactttagaagctgcctttaaccaaccccaatgaataccctcacgcatcacctgccacatccccaagtcacgaatccctacagtggcgcattccagcagttcacagaaactgaaactttgccttaacttctacagtgacctgctgccatgaaagtataaggcttcctacactgcacatccgcttccacccactggcctggctgtcctgcctctagggctattgcgcagactcagtagaaactggaacgaccaggagtcccagattctgatgtctaaagcctttagcttcctgctctttggaaagctcatttcaatcaagtctgcaggaggtagccatcttgaaagaagtgccaccagacagcgtgctggccattcttttgggctaatgggctgcctctgagaggaaagaaacaattgcaacccaccttttctgtccttttccaagacacgtcagcacgagcatttacacctgtccaaaagttgcaaggagtgtggctcatgctcaatagcatttccgtgatcccacctatctgtcatgaacctccagacagcgaaaaccaatcaccaggtcaaacctaaactgaagatgtctttttgccctgttgaaatcttgtccattttggaggaattttgaggtttatagagcaaagaatacattccctcaccgaggaagaagggaacagacagggcagattctaggtctacctctaacagaggtaagctagagaagtgaaactggctgagggaaagtgctcctggctttctctgtgtagagatcttgcccatagaaggtgataggtgggatgtttatgaggaatggataaataggacttctggaatgctccattgcttgatctgagtggtattacacagttgtccacatataggtgttcccatcacatgttaaaatgtcatgtgtgtgtaattgtgtttaatatacttttgtaatgatatgaatgttttaataattgtatatgccctgtctttacatggctagctgtcaggtagggtgaatggctctttaaaagacagttttcttttctttttttttttctttgagacagggtttcactcccattgcccaggctggagtgcagtggcacaatcttggctcactgcaacctccgcctctgccttcgggctcaagcaattctcccgcctcagcctccagagtagcagggatgacaggcacaggccgccccacccagctaatttttgtattttctgtaaagacaaggtttcaccatgttgcccagactggtctcgaactcctgagctcaaatgatctgcctgttttggcttcccaaagtgctgggattacaggcatgagccaggtgatgggccctgaccccaaagacagttttcttacttcctactccttactccctttctctaactcaacaccactgggtcttcagtggtcagctcagcaattacagatacttcttagaacccactatctcaaacttcccaatagggacaacaagttttggccagcctcaagtaaaaagtgagccaggagccagtaatctcatgcaaaaagggcactaccctaagatttaacattttttctctttctcttttacctgctggatcttgggtgaactgcgttgtattggtctttttacagatgcattagaggattttggtcaattggaccaatctagaggataacggctgttcagcttcaagaacaggtaactgtacgggagtctatgtagtagagcctggttctgaacctggccatatgatctttaaagataatgaaggctctgttgctaccttctatagtatccccagatttgtgagcttcttggcttccttgaaactttcattgaaaataagtttctctttttcagcttgctagtcttcagtgtgtaagcccccttctttcttaaataccacacccctaaaggattgacatcgtgaaggtgttgtgctttgtaggacaatacattattataagctccaagttgaggtatttgggagtgaagggttatgatgtctgctatttaccttcaaatagttcagtcgaaagaagcaaactggatagaagagcgagatagattataggtagaagataaagcaaatatggcaaaaattaacatttattgaatctatgtgatgtatgtaagggtctctgctatactattctttaagtttttctatatgtctgaaaatttttataataaaaaccttgagaaaaactaccagtgactgattctggattgtatgtaattgattctttggttgcttgttttctgtgtagcagaaaatccacgaataaagtagaggttctgtctatcatatatcattggcataaatatcctcagtgctcatctgataataaccattctgcacccatctgggaaggaccaggtttctgtttagtttaccaggatgaaagcctgtggagaaggtaatgaattgatgctatttggattttttttttttgagacaggatctcactcttgtcactgcagatggggtgcagtgccacgatcatggctcactgcagccttgacctcctgagctcaggcaatcctcctgcctctgcctcctgagtagctgggactacaggaatgcaccaccatgcccagctaaattttttttttttttttttttagagatggggtctcgctatgttgcccatgcttctcctgaactcctggactcaagcaatcctccaatctcagcttcccaaagtactgggtttacaagtgagagccactgtgcccagcctatttggaatttattgaccttctcagatggacggaataattttcatcaaatttgggaagctttggccattatttcttcaaatattctatctgttgcttatcccctctatttactttctgagactttcattacatatgtgttggtgtgctggaaagtataccatatgtttctaagagtctgttcactttatgtttttcactttttttctgtttcacttcttcatgttcctcagactggataatttccattgacctagcttcatatttgcttattctgtcttctgccacctcaaatctgctgctgagacctgttctctttgttgctacttcatagttctttatacatggtttacttcagttccttgaacatagttaacatagctgacttttaatctttgcatattaagtctgacatatgagcctcctcaggggtagtttcagttgacaacctcatttcctgaatatggactatacttttctgattgtgtgtcacaaatttttgttgaatatagaaattttagatcatataaagttgttactttggaaatcagattccctctctccccagggtttattgttgcgattgttgttgcagtttgttcagtggcattcctggagtaatttatgtattccctgcagtgtgcagtcacttgaagtcttttcttagttagctaatgattaatcaagatttccttcatttctctgagcaagttttccactctttgctgagggtgctgtgtgtgtgtgtgtgtgtgtgtgtgtgtgtgtgtgtgtgtctacttcaatgctcaagcagtttgtaagtctactttagccttctcttccttcttctcaagggcttcaagatcagctagaagtgaactactggtaccctcaggtatctcatgggcatgcacacatccctgtgtatgtgttgggccttctagatcctcaggaatatgtcagagtatttaagagttccctattaacatcttgttcttcagatgtccgtttaacaatttttcagagctcttgtttgctccctaacggtactgcaggcttaggctactacaaagttaaacaattgaagctgatcgtttttgaccagtgccctagtatcgcacttttccttcaaagtgagctttgagtcaggtgagagaatgagttaggacaaagaatggaaccacatcatggagctgtaagacaagatatataatgacattgctctgaggatgaggctttttgaggatttccaagcttatttgtctcctctgatacaagggtggtggttgaaggctgatggtcttcatggctactgtggttctgaggctgctgttttccaacggtaatgcagatctggggaaagggatatagaagtaggccaaattaaaattccacataccccactatttttaatgaggttcaaaatttttttcttgaaaagaaaatgctgttcaaaatattgtaagcctttggttattttccaaaattgactgtgatgatgtttatgttgttttaatgaaaggatggatacgcagaggccttgtctctgctattctggacatcatgccttatcacataatttattttttgcacagtaatctctgggataaaaatttattaactttacaagtaaataccctaagtcttctaatgattaaatggtttaccatgggttatacagttgatacacaaagccattactgtttatcaatatataatactgcaccaatttaataattgtgctaatgaactgttaaaaattcgaatatgtccccagattatttctacccaacctcacctccatgcttccatcaagtatctcaaagaaaaaatacagagaacatcaggataatgctaacagacagttttgtgtttatttggttgtatgcctgccttctgagtaaagagtaaagcctctacatcgctaagtcaatgtcatacaaatcctttaattatccgtattttgggtgtatgtctgtcatattctagacatccacatacccttgctttcttaagtgaataaccagattctctgaagaagagacactgttgtgaacaggaccatcagtaattttggattttttttcaccatttaagacgagaaacttggtgctcggggaccttgaacatcaagatcggggggctgagggagggataatatactgcatgaaaggtggtagtatattgcagccagaggcttgattggaaaagaacagcattatgaatgagcaggatagaactgataaagtaaaacgaaatgaaagtacttcctagaagcagcatgatttgaatggcttttgcctcaggggagaatctgtaggagctgctgagggtgtgaatgcgcctcactctaccatgtagacaccagctccaaccatgagtccatgaagacaacatctgggaaagtcaagagaaatgtgtattttgtgtaatctcagcactttgggaggccgaggcaggcggaacatgaggtcaagagatcgagactatcctggccaacatggtgaaaccccatctctactaaaaatacaaaaattatctgggtgtgatggcgcacgcctgtagtcccagctgttcaggaggctgaggcaggagaatcgcttgaacccgggaggcggaggctgcagtgaaccgatatcgtgccaccgcatttcagcctggcgacaaagcgagactccatcaaaaaagaaaagaaaggaaggaaaagaaaaggagaaaggagagaaagaaagagagaaagaaagaaggaaggaaagaaagaaagaaagaaagaaagaaagaaagaaagaaagaaagaaagaaagaaagaaagaaaagaaaaaacaaagaaaggaaggagaagaaatgtgtattttgcagtagatgtttcaggatttttagaagagcatagaccacaatttcatatcttggtagaattggggatatgccgaagggcctctacatgtttaagaacaaagatttttattgtaggttgaagaaccaatacagaaagcaggagaaaccgatgttcttcaaagctctgtctttgaacctcatccacccaccagccttcgggtgggtgattgcctgagaactgctcaagtggcaagtgactgtagctttcaggctgctcaccagaaatatacagatacatatatatctgtacacatacacacacacacacgcacacacacaaaactctaagaacctattatctcatgtgctgctttcaaatctaagattattattttaaaattttttgtagagatggagtctcgttacgttgcccaggctggtctcaaactcctgggctcaagggatcctccaaaggatccacctgtaatcccaaagtgctgggattacaggtgcgggccattgtgtctggcctgcttttagtctttgagctttacagggccctgaaggcctatctttgaattcccttactctcaccagatatgctcccactgcacaggaaaggctcccacccagctaactccccaatcagctgaactagctgcacccaacatggtcctcaatctatattcagcccatggaattatacaaagcaattgcattcttccacagaaaccatgggcacgttaccctctcattatataaagcctacttcccacaatctccgtgcttgttcactctattcctgagtgcaatacctatatgcaatgaccatttctctcaggctgtatctgtgactaataaactgctgtcaatttcatctagccagtgtcaggtgttgtgttcagccattccatactacttagggtagggagtccctccctcatgcaccagggtgaataggaggttgtcagaacatatgacacacacaaacacacacagaaaaatgttgcaatggtcaaatccagattagtgtttagtactccttaaacatctttatgtctgaagattttcataataaaatggtgaagaaaagatttcttgacaactgtcaaacaaaatggggaaggggcaaaaatctagagaaaaaaataagcaagattttgctggtacatttttacagaattccttgcaaaacaataggtttcactgataaccaaaataagtcagttatttcacatggaggtaaaaaaaaaccttgctttttaataactagaatacccactagaagttttatagaagattcagtcaagtaagtctcattttgttaaaaaaaagtccatatttgaagtgccagagttcatgcaatatttttctttttaaatatatttttcttcatgtaaaaattcaaatattaacaattttagagtgtacaattcagtgaagtttagcacattcacaatattatgcaaccaccatctctatctagttcaaaaacattttcatcattctaaaagaaaaccccatacatactacgcagatagattgcattctcccttcccctctagtgcccaataaccactaatttgctttatttctctatagatttacctattcagagtatttgatataaatgaaagtataaaatgtggaatttgcatttggcttctttcactcagtatgttttttggggctcattcatgcaacatgtcatcagtacttcattcatttgtataactgaccatttatgtattcatgtgtacatgcatgtagcacattttatttattcatcctttgataggcatttgagttttttcaaccaaatgctattttggctattgtgaacagtgctataaacattcatggacaaatatttggttgagtacctgttttcaattctcatgggtattttacttaggaatggaattcctgggtcatatggtaagtctggatttaactttttgaggaaccaccaaaggaatggcatattatcataacaaatcaaaagtttcggtgtgacacaaacttgaaatatatagccataaactcacctcatataacctcacacttttttcttccattactctaatgtgttgctggtttttaaatattttaggtaaatcttttataatctttggatgtttcagagttataaggctctagaaaaatgtaaacttctacttgtgatggatcatcacagtgggcaaaaatactacaaatgacagcaaaaataaggaattcacacttacgtggtataatcctttagactccttaataatgagtcaaatatgtattacaagacattttgattcataagaaaaaaacattttatttgcactacattgaattattcaacattttgtcttatgttgagaatttctttaaccctgaaaattgtttcttcgtgtaattccaagtaaacaatgaagtttataaatatataaagtacatgtcacatagtacagtccacaacacaacccctaagatcctttgtcactattcgactaatccttattatattcttatttttcatatattcaaaaggaatatttgacaatgaaatgtctaatatttatagaatattctctggaatcctttctataataattatgcaaaaccattataaaattatatatacaggcaagggtaattactcaaatctaaagtgccatcacacatttaaaaagccctgacaattactatgacattccagatcataagatgcttcacaatttaagacatggtaggatgtgaagaagtgaatccatgaaataaaaaataacttatcactgatgcttttaccactttcactgcattcataaaatctctgtatggagcaaattctgctcctatatttaaaagcttgtgatgtttaatgctatctaatcctccacagaaattatttcctgtgaccagaaccattgcttttaggtaaatgtatgactctgctgaagcagaatagatatggctccattaggattttatacctgcattgaacctaaatattattgccttcgagaataggatctttctgataactgagttagggggcaattcagctctgaattttaaataaagaattttagacaatcactgcaattctttcctgctatgcaatgggttttgtggccaatggccaagtttaactctatcgttttcccttctgatttaagtatctgatgtatatgtcactttcaaaagctttccacattccgtttcagaaggacctatctaccacatgagtttgctgatataattagtgacctttggtatctacatgaaggctttaccacatttactatattaataggggtttcctcttgtatgagtttgctataacaagaaagataaacattaactgggaagactttatcacaatcacattcactgtatctatgagatttctctcgtaaacaagatattcaaagagttttgactttcagattttaatttttacctgcaatgaggtgtgattcttcttagctttcctgcattccctccatctgtagggtccttctcctgaatgaataccctaatgtgtaacaaatataatttgagaatgatttatcattttcattacatccactggtgctgcctactaaatggaaagcttctagttttctaataaacttttttgacaatcactgcactcataattgactctctctttttttttttttttttttttttgagacagagtctcactctgtcacccaggctggagtacactggtgcaatctcggcttactgcaacctccacctcctaggttcaagagattctcctgcctcagcctcctgagtagttaggattacaggtgtgcacaccacacctggctatttgtttttttttttttttgtatttttagtagagacagggtttcatcatgttggccaggctggtctcgaactcccaacctcaagtgatctgcctgcttcagcctcccaaagtgctgagataacaggcatgggccaatgcgcctggccaatgattcttcttgtgagatctctacggtaaacgagggatatcttcaaaaaagaaggcttaaaatattcattgcatctataaggtttctctcccacaagagttccaaaagggcccattacaatcatagtattcatggaacttctattgtgtctgagctgatgtgactaatcaaaaaagctctctcatattccaagtcactgcatggactttcttccttcctgctggggtttctgatgattagtaatagctgatttctgagtaaagctttttgacattcactgcatctatagggcctctttcctgtgtgagttctctggtgaccaatgagagtttacaaagtagcgaatgctttcttacaatcactgcatttatatggtttctctcctgtatgaattctctaatgtacagtgagacaggatttaactatgatggctttattacacatgctacatttgaggagtttctcacctgtataggttctctgttatataatgagagttgacttacaggacaaaaccttcccacatccactgtatccataagatttcattcttgcatggcaagtttttcgatgcttactgagacctgtcttttgggtgaaagcttgttgaccttcattgcatcatagggtctctctcctgtgtgaattggctgatgagtcatgagatataccttactggagaaggccctatcacagtctgagcattcatatgatttatttcctatatgagttctctgatatacaatgagatttccctttgatgtgaaggctttatcacatacattgcatttgaagggtttctcacctgtatgggttctctgatgtataacaaagttttttttggaggataaaaccttcccacattcactgcattcatgggatttccttactgcatgatgagttttcttatgattgttgagatccaacttccagatgaaagcttcttgacattcactgcatccatagggtctttcttctgtatgaattcactgatgcttcataagctgagcctttttcaagaaggctttctcataatccaagcaagcatatggtttctctcctgtgtgagttctctgatgtatagttagctgtgttctaaccatgaaggctttatgatagactttgcacctgaaaggtctctctcctgaatgagttctgagatgcaaaatgaggttcgacttccaaggaaaagctttcccacatttactgcatccatagaattttccttttctatgaagaactttctgaggataactgagctcagatctggtcttcaaagctgtttgacattgaatgcattaatagggtatctctcctgtgtgaattcactgatgaatcatgaataaagccttttttgagaaggctttttcacaatctgagcaagcatatggtttctctcctgtgtgagctctctgatgtacagtgagatgtgtcctaaccacaaagcctttatcacatactttgcaaatgaacggtctctctcctgaatgatttctttgacataaaatgagttctgacttccaagggaaaacttctccacatttgctgcatgtacagactttcccttctctatgatgagttttctgatgatacacaagccctgaatttgtaatgaaggctttttgacattgattgcatcagtagggtctcactcctgtttgagtttgctgatgagcaatgagctttaactcactgggaagggctctcctaaaatcatgagattcctgggatttgtttcctgcatgagttctctgaggcatggtcatgagtagtttacaagtattcactgcacattcactgcatccatatgatttctttccaaaaagaattggttataattagcaagctctgacttctggatgttatgaaagctagtgtacgcacaacagagtaagtgagataacaagaagaggtccagaaaaaggcttcttttcccatttaccataaaaagatattagtaagatggttaaatttgagtaagctctgtattttaaataataatactatatcaatgtcaatattctgattttgatcacagtattctgattatgcaaaagaatgctcttcttcctatgaaatacacacttgggttttagggtagagttcagaaaaaccatatgtacctgtgtgtggtgtgtgtgtatagataaaataaagcaaattggtaaaatcatattttggggaaatttgcaaaaagaatgtgcaagaattttgtgtatcattttggaacatctcattaaatctagaccatttggagacaagcattttcaaaaggagaaaataaaaataaagatattgatgaaaacatacatagggacactaagtataatggcctgaatgtaaaagagataaacagtgtaatattcacccaatgccattctgcacaggactcagattcttgatctaggtgctggttgcacagtgtgctgactagaaagttacctagctgtataattacattatatgtatgttataccaaaacatttttcattaataagtaaacaaaaacgtttaggccgaaatcagggaatgctcccttgtaggaggatcctgaaaagaatttggatcttgtgctaacagtaacaggatgccattaccaatgatagtgggagcaggatgacatgtcctgatttccaatttaaaagcaacatcctgtgtgtatgtttatcagtaattaacactgaccatgtcttaaatattatggcatgaatatttttaggcttgcaccctgtgaatgagtacagatttgctacatcatatagcattttttagaccataatttagatctttccatcctccaactaagatttacctttttatatgaagctttaattactttccgcaacacttttgtcaaaatctgaagtcttttaagaaccaagatgtttctgatgtttattttaatgttcagggattttggaggtgaggggctagaaacactgactcctgcccctgactcccgcccctgactcccgcatttattttcataaatgaaaatagtaaaataaattcattaagggtattatgtggagaatagaaacaagagtaaaggactgagagtatattagagaaaactatcataattttggcaagagataatggacatcgaagcttgagtgaaaataactgttagagaaaggagtagaggacctcgagatataaggagaaagtaaagtctaaacttgctaaatggactggatttgtgggatgagtgaaacggtgaagcaaggatgacttgaagtttgagttagctattagatctccaagcaattcccaggcaaatgtaggaggataaggaaatatctagcctgtagagagaaatctgtgagtcatcaacatataaatagcattgttaagtccatgaaatcgaagaggtcacactgggaacaaagaaaagaaattaccaatgatgaagcacccttacgccctccaactctgaaggctttgggagaaggagatgcccagagaatggaaaaagtccatccatcacgctcaaacaataagtacccagaaaagaggccaacttaagtcttaggaaccaacatctgtgggaagcaagataaaatgaagtcttctcagctcttcacataaatgtaagtgctgtcactctgtttcagattcattcttctttaattctgcatgcaacagtcaatgaactttcccaaagattttttttttcttgagacggagtttcgctcttgtcacccaggctggagtgcaatggcgcaatctcagctcactgcaaccttcgcctctagggttcaagtgattctccaaccgcacctctggagtagctgggattacagggcactcgccaccatgcccagctaatttttgtatttttagtagagacagggtttcgccatgttggccaggctggtcttgaacttctgacctcaggtgatccacccacctcggcctcccaaagtgctgggattacacacgtgagccaccatgcccgcgccttcccaaagatttctaacaccatatatacaggaacaccactgtggtgagcactcccaccttctaggttgctttgatacattctcatatgattcactcaggtctgtaggaaatacaaaaatcaggccaaatatccttaccccaggataaaaggcagtgctgtgatgatgtgtcgattgtgagaatctaagtcaatataaagagagaaaaaggcacattttctttgaaacgccaaacaaaagagagcctcatcaatgatctaggtatctgtagtcaccttccaagtctttgccctgttaaacacatttggaaggggtccaaccctcatggtcagctcctttactttccaggtctcccatcttgttggttctcactcacctgaaatgcactgacctcacattttatcctctattctccatgtttgaaattaaatatcactggctgggtgcggtggctcacacttgtaatcccagcactttgggaggctgaggcgggcagatcatgaggtcaggagattgggaccatcctgaccaacatggtaaaaccccagctctactaaaaatacaaaacttagctgggtgtggtggcacacgcatgtaatcccagctactcagaaggctgaggcaggagaattgcttgaactcgggaggcagagattgcagtgagctgagatggcgccactgcactccagcctggcgacagagcaagactccatctaaaaaaaaaaaaaaattaaagatatctggtttggtagcttaagagcctgtttatgggaaatgacaaagacttgaacacttataattgggcttgatgggaggtgtctatgaacagcacagaaatgtttctggaactgacacactttcagctcggcagattcaacatctactatgacagaggctgcagtgagccaagattgcaccactgcactccaacctgggtgacagagcaagacctgtctcaaataaaaattaaaaataaaaaaaagtaaaataaatacataaggaaccacccccagctgacagccagcaaagaaacaaatctcagaattagtctgccaataccctggataagcttggaagtggattcttcccagattcttccaataagagccctgttggcccacaccttgacttcagtctttgaaacccagatcaaagaaaccagtcaagccaatccagacttctgacctaaagaactgtgagacaataaatttgtgttgtttcaagctgctaaacgtttgtgagaatctgttttggcatcaacagaaaattaatacattattgacaccagaaacatcagaaacaggccagttgtggtggctcatgcctataattccagcactttgggaggctgagatgggcaaatcacctgaggtcaggagtttgagaccaacctggccaaaatggtgaaatcccatctctactaaaaatacaaaaattagccaggcgtggtgacacacaccttaatcccagctactcaggaggctggggcaagagaatcactggaacccaagaggcagaggttgcagtgagccatgatcgtgccactgaacctgtgtgacagagtgagataagaagaaagaaagagagagagagagaaaaggaagaaggaaagaaagaagaaagaaaagaaagaatcagaaacaacttaagtacatcatacattcttacatatttattcacctgtattcacacttaaggcactctgtatgaagctacatttcctcattccacctttacctgaatcttgattttatggtttctgtttagttttccttaaatttttaaattacaaatgtatgtatttccatttaatagttatttgtcttaagccttgcaaagtcattggaaagaaaggcaaaagaaagaagcaaaacctcaccggggcttttatcgtttttttcttcggttcttaggaaaaggatatcatttctaaggtatgatctagatattgtcttttctgattctgaacatcggacaaaagatctcttttcaagagaaaagaagacatgtcagagagaggcccagcttttagaattgtgacaattactcaatttccctcccttaatgaaggacaactttttaaaaacacaaagctggccaggcgcggtggctcacacctgtaatcccagcactttgggaggctgaggtgggcggatcacaaggtcaggagttcgagaccagactggccaacatgatgaaaccccgtctctactaaaaatacaaaaaaaaaaaaaaaaattagccgggtgtggtggcaggcacctgtaatcccagctactcaggaagctgaggcaggacaatcacttgaaaccggaaggtggaggttgcagtgacccacgattacgccactgcactccagcctgggcaaaagagcgaaactccatctcaaataaacaaaaaacaaaaacaagcaaacaaacaaaaagaacaaagctagggttggaaaaagccctcagaggtcagactaatcagcaccaatgaggaatttctagtcctctacccccacccctaaatacagatacagaaaaaggcaatgagaacctggaatgtcttctcccttgcatgggatcagagccaggcaagttctggtgggagagctgacactggatttctactctgaggtctggcaggttctagtatttacagacccaagttctaaactgggaatcaagacaaagtggatggaatctgtaaatctgtgcaccagcagttgtaggtttttaagtgtgtcaaatttctttatacataaatcatcttcccacttgtaatagaagttctttttaaaagttgctgacttagtcctcaaagcactgcattgtagacactgttctagaagctttctgttaacagtgatgcagttgttaataggccagttccggacactccataggacacagacacctacacacctaaaaaagtttcatctggggtgtaaaaggagaaagtcagcagagtaaggttaggtaagacccatgccctgagtcccctccccagcctccaacatgggatccatctggcccatgagagcaggaagaacaagggcaaacatgtcccacacaacaatgggattctgtaggactgcttcccacctcagccacacagcagggcagactcaccaagaaccgactgggtctgacccaccaaagactgccccagccaaagcagaactgccagatgagctcagaattaatatgcccaaggccaattccctcataatgttgcctacagaagccccagcaagcaccggctaaggttctgactactaccgtcttcaactgccttgaacacccagatagaattcactcatgtgtgtgggggaaagaaagatagatcagactgctactgtgtctatgtagaaaaaggaagacataagaaactctattttgatctgtactaagagaaattattctgccttgagatgctgttaatctgtaaccctagcctcaaccctgtgctcgcagaaacatgtgctgtgttgactcaaggtttactagatttagggctgtgcaggatgtgctttgttaaaatgtgtttgcaggcagtatgcttggtaaaagtcatcaccattctccagtctcgagtacccagggacacaatgcactgcggaaggccgcagggacctctgcccaagaaagcctgggtatcgtccaaggtttctccccactgagacagcctgagatatggcctcgtgggaagggaaagacctgaccgtccccaagcccgatacccataaagggtctgtgctgaggaggattagtgaaagaggaaggcctctttgcagttgagataagaggaaggcatctgtctcttgctcgtccctgggaatggaatgtcttggtgtgaaacccaatcgtacattctatttgctgagataggagaaaaccaccttatggctggatgtgagacatgctggcagcgatactgttctttactgcactgagatatttgtgtaaagtcaaacataaatctggcctatgtgcacatcgaggcacagcacctttccttaaacttatttatgacacagagtccttcgctcatgtttcctgctgaccctctccccaccattaccctatagtcctgccacatccccctctccgagatggtagagatagtgatcaacaaatgctgagggaactcagagaccagtgccggtgcgggtcctccatatgctgagcaccggtcccctggggccactgttctttctctactttgtctctgtgtcttatttcttatttcttttctcagtctctcgtcccccctgacgagaaacacccacaggtgtggacgggctggaccccttcaatgtggagaaaaatggccaaaggcagatgtgtgccagaaacccctacaggggctaaacagtcaagacacaccagccgctaactagaataagttgttaggcctcctaactgtacttcccataaacctcaactgcccagcacaggtgtctcaagcactgcccatggccaaactacacttcctaggaagctcagcagccctgttcaaaagcctcagttcccagagaaggcaaagaggggctaaacaccgggtagactacactgcacaaattcagctgagcttgcttctccctctcagggaacctggtgctgattgctggtaattgcctccttctggtccctccctgggaggattaacatcctaggggcattgggtccagtgcgtagactgagcttcatctgccccttgttcaggtggggggaacccatcagtaaattatagtttttataatccacttgattcatatgggacatttatagcagctatttctaacatccttttctgctataagtgtgccacttctgggtctctactgagttttcttcatgttatggggttatattttcctgcttctttgcacacctgggtaagtttgtattggatgccagacatggtcaattactgactggtagattgctttctatttctttattagtctctgtttggaaaattgctaacttacttggaaagtatggccttttcatggcttgcatgtatgctttgtgaggagagttcgaggcagcctttactgtagagcaaatctgagccacccacagaggcaatactccttacttaaggtccactgtgattctccaaatgttaggaggcgtttccactccagctggtggaaatgcttgtgtgtaatccaaggatttttctgcgtgttcatttcttcctgttcttcctccagcctagggggggtttctcacatacatatgctgattatgactcaaaaggcttgtgggggaaactctacagaactctcaattcttgagtgcagctcttctccaataatccaattcatgaatttgggccaccttgaattcctcaaaccctaaactctgtctcaattcagagagatggctgggatctgcttgggtttctcctcccaatcctgcagactggaaactttctccaggcactaagctggggcaatcataaggctcatctcattgtttcctttctgtcatggaaagctgtcctaagccctttacttctcaatgtctgatgaagttcattcatatattttgtgcatcttttttagatatttaaggcaggagattatatacattagacatttactgtaaaagaaaaagggactgtttgggttggctatgaaaaagttagtcaatatccaggtgcattatgtcatatgcattccgtactcataatgaagtatgttagtttcttttccccccttttttagagtcagagtcttattctgtcacccacgctgtagtgcagtggcatgatcatagctcactgcagtcactgcagcctagaactcctggactcaagcaatcatcttgcctcagcctcccaagtagctgggactataggcacacaccaccatgtccagctattattatttttttttttttttgtagaggtagtctcgctatgttgcccagggtggtctcaaacttgcgggctcaagtgatcttcctgccttggcctcccaaagtgctgagattacaggtgtgagccactgtgcctggccaggtaggttaatttatataatttcagaatagatacaaatttacgtttagcaacatttcaagcaccataaatctcatgttctttttggacatttaggagttattttccagtgctgatgtgattttaacatttcaagagcatctataatgctcacatataacaatcatagcataagattctctgattatagaataaaatcttaacatacttgcctcataataagatagggagattatcctggcttatctgggttttcacagtgtaatcacaagggtcctcaaacatggaagagggagacagaacactcaagtgtttgagtgatgtaagactgattggccattgctggttttgaaaggaggccccaaaccacagaatttgggcagcttctagaagctggaagggcaaagaaagacgctcccctagagcctccaaaaagaaaagcagccctgtcaacagcttgatgtagccccgtgagatgcatttggacttcagtcctccagaactgtaagataatgattttgtgttgttttaagccattaaatttgtgttagtttggtgcaacactcataaaaaactaacacaattttacttccatatttgttatattcataggttttcattacataatactattcctggggttcaagatttcattaaacacgtccctccaagactctcaagacataaaagtatgatacatgagttaatttggtgagttgccatcatttcttactttcaagagtttttcttttctacaaattctcccatattttacgaaaaatgttttccatatccattgcctctacagttgtctatgtttctttggcacacgaggcacaatttagcgctaaaagcaccatcacaatctttcataaatattcctgtaagaattcttttgataccaattgagatatcatctccaggtaaagacttcctcataacagctgcatttctacccaacatgatttcaatggtgtttaacaggtttgacttctcacagaaatgtcctccacaaccactgcctccacagtgtttcagccctaaatgagctctctgggatataatggctggaggattcctactaaagattttcccacctttctggtatcagaagatttattctgatacaatatctgtaagatacaagatataatttattactgatggggccacattcacttcatttgtgaggcttattctctgttcaaattcctgattaactacaaaggcttgatttcttggaaaaggttgttccacaatcactacatttctgcccactaggcgctcactcttgtttaacaatggcggggttcctgaggaaggcatttctataggtactgtgttcacagtcttttgctcttgtatgagttcgctcatgtataaggaggtatgactccttgaggaaggtttctccaccgtcagtgaatttatggctgtctctcttatgtgagttttctcatgtttaatgaggactgacatgtgggcaaaggctttgccacattctctgcatgaatatggtctctctccagtgtgagtacgctgatgctgaatgagcttcgacttgcttctaaaggctttttcacactcactacattcataaggtttctctcccgtatgaatcctctgatgtctggtcaggtctgacttaaaatagaaggttcttccacaatcactgcatttataaggcttatctcctgtgtgaagtctctggtgtgcagtgaggtatgccttctgagaaaaggctttcccacacacactgcacccatagagtttctctccagtatgtgatcgctgatgtctattgagccggcacttccggctgaaggcttttccgcatttgctgcatctgtagggtttctctcctgtatgggttctctgatggaccatgagctgtgactttctggagaaggcttttccacattcactacattcatggggcttctctcctgtgtgagttctctgatgctcagtgagctgaatcttcctcatgaatgttttcccacattcaccacatccatggggtttctctcctctttcagttctctgatgttgaataagctgtgctttcctggagaaggctctcccgcacacactgcattcatgtggtttccctcctgcacaaattttttgtaggtcattgagctgtgatttagggctgctgggtttaacacatctatggtatttaactccagtaagagttttgtcacgcttgatatggaggcatgatctcccatatccaccaaatgcatcagaatcttttcctgcatatcttctactctggattacaaaacctaaatgagatttcaaacttttacaatgcgagccaaacttattgtgtctttacattaaaggaacaatgctcttacataaaccaaacttatttccaagggcataactttgttgacatctttcaaaatgtttaagctcattttggttttctgggtaccactgcatatggtaaaccccccaaatttctcctaggaaaaagcacaatatgaacatccatgataattttttgtggaggtggcagaaggtgcaaaaatgccatggttttggctggcttttataagatctcagtctcagagtaatgtacctcacactctgtgaaaaaggatgatactataaaacagcaaaaggaaaatacagcaacttcagcaacaacaatggatactctataatgaatcaatacaacttgggctgcctcccaaatcggaccttgcaaatggagacagaatagaaacagaaacacattgcaactggaataaatcaaaaatagatggaggggatggatgtattcacccaacaaacactgaatagactggtatttgggatactacagtgactaatcattattctctctctccatgaacctgtcattcaggtaaagacagagaatcaacaggtatgcaaagacgtaagaaaattacagaatgtgaagaacagtacaaaggaagtggctcacatcatagggtaagaaaaagcaatgttatgcaaagaacaaaataaagaacattccaagaaaagggaacagccagtgtgaaaacccagaggcagaaaaaacttaggtgtgataaaaaaaaaaaaatgtaagagaagctggtttacccggaatatcctgagcttgagtgaagtagaaatacaaaagtttggcaaggctggcaggattaaaaacatgaagattttggaggaagactttgttagaaactggaatttatgctaagaacaatggcagtaagccaccaaacatttttttgccaagaaaacatgttctgaattgacagttccaaaacatgactgtcctatggagaatgaattgaaaagatgaaattatagaagggaatatgctggaggttatggcagaattcagatggcttgatcaggaataattacaatggagatggagaaatgtgaaaaaacaagaacataagtatggaggaggaaaagataggattcactcttagaacacatgttcccagcagaaaagcgaagaattgaggataactgctcagtatgtggcttaaaacacctatgtaggtgctggtgccatttaataaaatgagggtaaaagaagcctcataccaaccagtaaaacacacacacaaaacaatatatgaccattactaagttagtgcagcatagacacaaaggagataaaagtcagaaaagagggtggccaggcgcagtgcttcacgtctgtagtcccagcactttgggaggtcgaggtggatgggaggagttcaagaccagtctggccaacatgctgaaaccctgtctctactaaaaatacaaaaaaaaggattagctaggcgtggtggcaggtgcctgtaatctcacctactcgggaggctgaggcaggagaatcccttgaacctgggtggcagaggttgcagtgagccaagattgggccactgcactccaacctgggcaacaaaagcaaaactctgtcacaaaaaaaaaaaaaaaaaaaaagagagagctccaaatgtgccctggcatagtcaaaaactagttcttggaagtaaaacaagagccgacagcgaaagagggcagtatctggatgtaaaaatgcaacgtgatcaaatgcacagatgtcagtcctcatgttatttgacattatctgtagcattcaataaaatatatgtcttcctcctccttggaataattttgtcacttatttcatggacatcttctgactctcccaccacaaccctgatactttttctatgtggctgggttctcctcttttgaatctctgaatatatgtggacctcttctttcttcaagcaacactcactcctcatgtcttctcatcaagttccagtgctttgatggcccctgcccagaggggaatgaagccatcacatcaaatggaactcacagaaaaagagaagtcagtcaaacgtgcagcaatggaggcgataagaacctctactaccatggcctactgtgaagtgggacttcaagagtagagtgttcaaaacaataaaaattaacaggagcagctgagacattcagacgtagaacagagtaaaccgagaagactcaaggcaactccaaggtgaccaggcaccggagtgatgagcaatacagcagaacctaaatataatgcacagggagggaaaggattttccaggaggaaagagaatcacagtttctaaccctgaagctgagggaagaagaatttcacagaatactcgtccagggtgctggcaaaatatagaataagaaggcaggtgagattacagaaaaggagatatctgcatgaagctatttgtcagaagacacagctgaaatctttagtatatgtgagtatactacatgatggtagaaacaactgggagaaaggaggattctggtttcacatcctggaagaaggaaatattcggagagctgtcctggtggctggcgacacgcagcgggttagagtgcagatgagacgttagtagcagacatgctactttgcgagtctccagcaggggccagagagctcaggccctgagagtgaattaaacttctaccaggagaatcagcagaagataaaaaaaaaaaacagaagctggaaaggcggggagcagtgggtgagtaagtcgacagagatgccccaagagacatggtgtggaggcattgacgtgagctaaggtgaggtgattttcagtgaaggaaatcaggcctttccagaggggccgggatacacttttaagcgacagaagtgctaaaagtaatgcaatccagccaggcgcagtggctcatgcctgaaatcccagcactttgggaggccaaggtgggtggttcatgaggtcaggagtttgagaccagcctggccaatgtagtgaaaactcgtctctacaaaaaatacaaaaaaattagccgggcctggtggccggcacctgtaatcccagctactcgggaggctgaggcaggagaatcacttaaacctgggaggtggaggttgcagtgagccaagatcacatcactgcactccagcccagccacagtgcgagactccgtctcaaaaaaaaaaaaaaaaaggcaacataatccagatgggttacgaggggaatttcaaagcaagtaaggaaggggcaaaagtcaggagcaggctgggaagaatggaaccaggtaagaattcaaggtcttcgatgacatggactgaaatcagatccagaaaatagaagaaaggaagacattatcctttgagagccggctctattagggatggacacagatgcagaaaggctgattaggtttctgggccaccaactactgtgaagtcctctaaagaacactttaaaagcatcaacccttctccgaccagctgggatttgcatgccatttctccccattttcttagttttcactcacttacctggacagatttgactgtgggctgctccttctgctatccctgggggttctccttgctccaacttgaagagcgaatctggcttggtgcctcgataccctgtaaatgggagatcactgaacacttggcacgtgtgcttggggaatggatgaagatggagagggttatgtctcaggaaccacagcatttgcactttgataaagcaaaactctttcactcaggaaaagagcacaaccacttcgtgccagggaggaaaataacagtctgcgtgacacacccatacccattaggatggctactatcaaaaaaacaaacagacaaacaaaaacagaaaataacaattgttggcaaagatgtggagaaactgggaccctgtgtactcttggtgggaatgtaaaatggtactgacattgtggaaaactgttcctcaaaaaattaacaatggaatgaccatatcacccagcaattccacttctgggtatataccccaaagaatggaaagcagggtctcaaagagattatttgtacacccatattcatagcaacatgattcacaagcgctaaaacatggaagcaacccagtgttccttaacagataagtggataagcaaaaggtggtatatatatatacaaaagaatattattcagccttaaaaaggaaactctggcacatgctacaacatggataaaccttgagaacatcataataagtgaaataagccagacacaaaaagacagacactatataattccacttatacgaggtacttagagaagtcaaaatcctaaagacagaaagtgaatggtggtcaccaggagctggggagaagtgggggaatgagtagttgttgttttgtgggtacagagtttcagttttagaagacagaaggtagtgttggtggctgcataacactatgtgcgcgaatgcatttaacccactgaactgcacgcttatggttaagacggtaaattttatgttatatattttaccaccacaacaaaaaatctataacatataatactttagtctaaaccattaaatatttatgggaccgtacagtggtcaccaaataagaaagaaaaggtaagtgacggcaatgctgtccttacctattgatactaggttgatgtagttctccaacattacttccttgtacaagaccttctgagactggtccaaaaactgccactcctccctggtgaagcccacagccacatcttcgaatgacaatgacccctataataacaattccaatgcaatctgaggtggataacaatagatgatgcggagaagagggacggggacatgtcttgatccttttctccatgacaacgtatgcacaccatggctatttcacataccaaaggaccatggaattccaccaattctgcctaccctaaaagcacgaaggcagtactagcatagatatgaaacaacatgtaataagactgttcattattcctttgtttctcataatgaaaaacttaccaataatctaaatgtctatcaaaagcagacagggttaaattacagcacctccatgctataatatactgcaaaaatgttaaaatcaatgaggtagatgtatacatacccacatgattatcaatgatctccaaggcagtctcttaaatgcaaaaaattaagctcccaaataatatatgatctaagacatattttaaaaatgtaataatacggctgggcgtggtggctcacacctgtaatctcagtactttgggaggccgaggtgggcagatcacaaagtcgggagattaagactatcctggctaacacagtgaaaccccatctccactaaaaatacaaaaaattagctgggcatggtggtgggcacctgtagtcccagcgacttgggaggctaaggcaggagaatggcatgaacccgggaggcagagcttgcagggagccaagattgcgccactgcactgcagcctgggcgacagagcaagactccgtctcaagaggaaaaaaaaaaaaaaagtaataatatggctgggcatggtggctcacgcctgtaatcccagcactttgggaggctgaggcagggggctcatgaggtcaggagttcgagaccagcctggccaacatggtgaaacccccatctctactaaaaatacaaaaattagcagggtgtggtggcacgcacctgtaatcccagttactcaggaggctgaggcaggagaattgcttgagcccaggaggcagaggttgcagtgagccaagattgcgccactgcactccagctctgggcgacacagcaagactccaacttggggggagaaaaaaagtaataatatttataattacatatgtataagtatacacaagtatgtatacataaatgtacataaatatgaatatattctaccagatgtcaatcacagggaggaactagatagagacccaaactatgaacacttatttagtatcctttgggttgaagtttgggcagaaaaagggtgaaaggagatactgtcttttgatacaaatgcttctgtttgcttgaatctcttgcgtgcaaatgtagccatgtatcatttcagtaattaaacatagaaaaagcaaaacaagccgaactggtgctttgttttttgaacctggagttaagaaggtaagaaagaagcattgtcagtatctgcattccaagctgttaccaaagaatggagctgttaattgtctcctgctgtctcaataacaaaaatctggatgagagaattcttcttcagggaggatcattcaaaggtcaagcagcccattcattctactggatactccaggctttatcactgggcaaagtcagatgaccagaagcctctattttcaaggcacgctattttcgaagaattttgtccaatccagttttcctttggcattactccttagcttaccccactaaacaacaggaaaaagccatagaaaacatcccatgcctttattacaaggctgactttgaggataccgtcaaccacaaaagctctctgaaggaaagaagtttctcaagctctcacagcaatgacaaatttacctcccctgaagaactgccttgctctctcctcacagacattacaatcgtggcatttttcatgtgtttcctgttatttcagctgccaaaaaaaaggagacacagtttaaagcagagaaaacccacagggtcttaacagtcacttagctatgttccgacattaagaactttcacaaaccccctgatccatatatcttgtttcttaatttgccaggattttaagattccaacttaaacttattttcccacagatcctgatttttatcagcatacactatctcatttaaccagactgtcttttacaagcttccacagacccattgggaaacaaacgacaaaataggtaaaacaaacctcacctgggccttgcccatttcgttcaactcttaggggctagcaactctagtatgttctctctcttctgtctattctgggccttcccagaagtggtggtcaggtatcatctcaggtcaagctaccactggaaatgatgatcttccccagcctggaagctccttcttccattactgaaaatgtcttgttcctataggccagaacctgtggattcaagaccaaattcaatgataagaagacatgctcctaggatcacaagtctccaattgccatctggactcacattaacatcaggttccaatatttcatctgtctccttaacaccctggaagccattacatcatggggcagtgatccagaggaagatatggaatgtgcaagaggaatgcctttttttttggttatgtcagaaatagagtggatgtgaaacaggagaaagtaaacaaaaaccacctatggtcttgtccactgccaagttctcacatatatcagttttaggtaagacaatgaaggaagtggtaaagccagacatggtggcatgtgccctagagttccagctattgtagaggctgagatgggtggatctcacctgagctccagagttcaagaccagcctggacacatggcaagactctgtctctaagaataaaaacataaaagaagtggtggctcaagaaactgacttaaaatcaccaccggcagccacatgctcctaaatttttggtttattgcactgtcttactaatcatacaaaccataagcactgtcttactaaaccctcgatactactttataaggtactcattattatttccatcctaaacatgagtaagctgaggcttgctgagacaacgtgtgttgtgcaggttaacattcttcctcattagtagcatgggaacttgaatctacatctggggtctctcccttgtgatacttccctcctacaacagccttacagtgcaaatttgttctctttcctacccacttttagaactttacttcccagcactttacactgcggggtggccacatagtcacagctacacaaacaagggcctgtgatctcctaatgcaatattcagtgtggatgctcagcctgctccttccacacagacaggaaagcaaaggcggtcccatctttgccccagaagcagcagttcagagatcagtctccccaagaaccactctagaaactcacactctgagaacacccacactgtgagaacaacttgaattttgctgtcatcccagcaagtcattctcaagactctctagcaagcctgtatcctttacacccagagagctgatctccaagccattttctgacccactggtaaacgcactggtcaagatgcaaacctcctctaccttcaatcctgagaccgcttcatcccagccccagcccttcagtctagcctccctacaggaccagtccaaaaacagtggtacccaacccaaatgcagaaatccatatggatagctaagaggtagaaaaggccattacgcatgaatgggttggagctgagatctccagggttgaaaaatccaggatccaaccattcccagaagctcatggcaggctttccctcatacataatacatcagaattgcaccaaatactcacgcggagaacatggcaatgtaaccgagaagggcaatgataccaccctgactggtaaggataatctggatttcctactgaactgaggttcaggtcaaatgtccagaggacactacctaaattaaagaggaattttcttaagaaagggggcttggttgtcagattggcagccaacagtatccaataaaaaaaaaaaaaaaactagggtctgctgtgttggctcaggcctgtaattgcagcaattctggaggtgaaggcaggagaattccttgaggccaggagttcaaaaccagcctgggcaacataccaagaccttgtctctacaaaaaaaaattaaaaatttgccaggcatggtggtgcatgcatgtagtcccaggtacttaggacggtgaggcaggaggatcgcttgagcccaggagttccaggctgaattgagtttatgaccgcatcactgcaccccaacctgggcaacacagcaagatcctgtctcaaaaaaaacaaaaggcaaaaaaaaggcttccacttcaaataaaagttaggatgcttccaaaccattacaagccctcagccttatctgcttttgggaggaatgaagcagggaggaaggaaacaggtgatttctcccatatgatgtcctacctttggatatggctgactgctgtatcagggtatcattttgtgtgggctttttaaaaaaaatttttttttttttttttttgagaaggagtctcaatctgtcgccaggctagagtgcagtagcgcgatctcagctcactgcaacctccacctcccgggttcaagcaattctctgcctcagcctcctgagtagttgggattacaggtgcccaccaccacgcccggctaatttttgtatttgtagtaaagacgaggcttcaccatctttgccaggctggtcttgaactcctgaccttgtgatccacctgcctcagcctcccaaagtgctgggattacaggtgtgagctactgtgcctggccaaattttttttttttatagagacaaggtctcgctatgttggccaggttggtcttgaactcttggcctcaagcaatcctcccacctcagcctcccaaagtgctaggattacaggcatgagcgactgctcccagcctcatggtatagtttaacttgttgttctctacctacccaactcccagtttttccttttaattaagtgagtagttcaacttagaggtttgattagtcccatgttcaatttttttaggtaagaatccttcatggatggtgctgtgtacttcctactgcaacatatgaagaggcatgagggcaaaaaaaacaaagaaaaaaaaagggggagctgttatagaattaaagagatctaagagatacaacaagcaaatcgaatgcacccacatcatttggatcatgattcaaacaatccaatgttaaaagacaatgatgagatgatcagaaaaaaactgaatgtggactaactattcaatgaactaaagaaataggctgggcacagtggctcacacctgtaaccccagtactttgggaggccgacatgggcagatcacttgaggtcaagagttcaagaccagcctggccaacaggaagaaaccccatctctacaaaaaaatacaaaaattagcctggtgtggtggcagatgcctgtaagcccagctactcgggaggctgaggcaggagaactgcttcaacctgggaagtgggaattgcagtgagccaagataacgccactgcagtccggcctcggtgacagagtgagagtccactcacccaaaaagataaggaaagaaattattattaacttggatacactgaaaatggtctaggatgggtgaagtggctcacacccgtaatcctagcactttgggaagccgaggcagaaggactgcttgagcccaggagttcaagaccagcctgggcaacatagcaagatcctgtctgtaaaagaaaaaacaaaaaggaaatggtctagtggttataaatttttttaatgaccttactggttagagattcatactgggatacgtacaagtttcaaggcatgaagccttggatttgctatgaaagtctccagactaaaacaaaagtggaggcacagataaatatgactgatatgacagatgaatatgaattgataaccattgaagctaagttatgggtaaatattatactcaatttccatgaaaaaaagttagagtcatcagagcctgatgagttctatctaatctttacagtacagagatgactccaatattatgtaacattcatcaatcacagaaaaagtgaagcctctctaacaattatataaaaccagcatttccaaacacaaatcaatagaataaaaaaaaaaagaattatagagataggtgcttttccattgattttcatccttccttcttttctaatacttgcattcaaggttataaatttcctccactgactgcttaggttaaattcaacaagggtttacatgtagaattcttattaaaatgcaattgaaaatatttccactgtgattttttgaactcagattatttagaagcgtatggcataattaacaatcattctgacaagaaaacagcatgttctgaattgatagttccaaaaagtcacatgactattctatggtgaataaatcattttgatattgatttatagcttaattccactatagttagagaaaatattctatatggttttaatcatttgaaatgtatttagacttgcctgatggccaaccatacggtgactttttataaatgtcctatgtgcatctgaggaaaattattgagtgcagtgttttatattggtcaagtttgttaattaggtatgtcattctaacctttcaggggttgggactattgtgggttagctgaatgtttttgtaaataatgttttatcagaacacagccacacccatttgtttacacattctgtacagctactttcattctataattgcagaacctagtagatgcagacaagaccatttagccggcagagactaaaatatttgtcatctgtctgcacctttacagaaagtttgccagcaatggttaatctatacccttttagctttttgtctgcctgttctctcagttactgagagaagtatgttaagaatttcccattatgattgggcatttgcggtttctccttgtgtctagcatactccattcctctatacttaacacactaagtatatgctctattgacttttttttgagatggagtttcattcttgttgcctaggctggagtgcaatggcatgatcccagctcactgcaacttctgtctcctgggttcaagtgattctcctgtctcatcctcctgagtagctgggattacagacacccgctaccacgccctgctaatttttgtatttagtagggatggggtttcatcatgttggccagatgtctcgaactcctgatctcaggtgatctatccgcctcagcctcccaaagtgctgggattacaggcgtgagctctcatgcccagccctcaatagaacttttatgcaccaaaagacatgtagaaaaacgttcatatcaacaatactcataactcccataagccataacaatgtctcttgatagtggaatggataatatggggtataatcatcaatggaatactacacagtaatgaaaaagaaacgagctactgctatatgcagcaacttagatgattttcacaacaaaaatattaagcaaaagaagccagccacaaaagaatgtgtaccttaggatttcatttatataaagatgacaaccaagcacatctatgatgtttttaagataataattacctttggagaggagagagaagatgagggcttctgggatgctacattattctatttttttaacctggtgattttcaagtataatcacttgaaaaaaacttaagagaccaatttctcttataaatgtataggcaaaaaaattttttaactttctactatgaaaaatttcaagcaaaagaacagtatactcaaattccacatattcatcatgtgacttcaagaatgacgaactcacatctaattttgttttatctataccaccattcagtccctctccagcaatggattatggattattccgaagctaatccaagatatcttttcattttttgatgcaaaaatattaaataaaattttagcaaataaaatccagtctcatattaaaagaacaaaccattattgacaagtatggtttattccctcaggaatacatgaaattgggaaatagagcaacacaaatcaaagaaaattttaaagagaaaaaaataaatgaaaataattgtaatggtcaaaagcccttaggaaagagaaataaaaacttgataaatcacagtaattatttattcagaccatactacgtacctagtactacactttgaacatacttaaagaacatttgctcacttaatcttcataatgattccatgaaaaagaaactatgacagcttttttccacaaataaggaaactgactcagagattaacgtacccaagtcagaggcagaggcaggtacttcttactccacagtccatacacttgccacctggctaaaattatttgcagatgacaaaaatgctcaactagaaaaaagacgtcaatttataagttatatgtaatgacatgagtacaatgaagtgacagaataaacatatatatttttaacttctgttcttgtcaactaagtaaaattaggaacaaaaaaggaaagggggaggggtcttatgcaaaaaaaaagtcacgatttacaacaaaaagtattaactatgtagaaataagcataaccagaaatgtccaagatacgtatggaaaaacactacagatagtcaaacaaataaaaatattgggttaatagaaatccatcacatgttcctgaaagtgttgtatctagatctacatcaattctacccaaattaaagcaaccacttgatgaaactgcagcaatttaaaaaactctcaaagagcatgtaatatgggaatacgaagttgacaagatgttattaaagacgaataaaattataccaatacctagacacctgatcccaacattaaacatgaaatacactaaaccagagttattttctggaggagtatttaaaatgatggggatgttattacttgggtcgcaatgaacctgaaaacccattttctacagaatatacagcagcagggaagcaaggggaccagcagacccctttttaagtacgcatgtgataagcaatgaacacgaactgcccagagcagtctccaacactgacacgattcgcttccccaccacgacgccctagcgctactgtgcaacgaagacctcccaagcactggttccaatgcggagaccatgggctcccagactctgggaactccaacacgactgcgaaacgaactccgagcgaggactccccgagagctccccgcaacacggacctcacgcgctagcgaacaacagaaaaaaaaaagcgcgctctccctgcccctgaaacattcccagaagcccacgcagaccagaccgatgacctgtctccactgctggaggcgagtcagggacccgaagtctctaaacactcgcctctacccgccgccccgcgaaccccacacactgcagacgcgacactcgcaagtttcggggatggcggccggcgagggccatactgcgtctttccggagacacggaatacggcaccagccgtccctttatgatgcaatatgtctgcgcccaggggacgcttgctgggagcagccattttcaaccctactgccgtagagcaggcggagtccctcttttcgcgccttaagacaggtaggttctgacgatgaaaagcaattgaaaacgacccatttcaccctttttccagtccacgtgaactgctagatcttggctttgcaacattagccaggggcgctacataaactgcttagtttctcaaaggctcaagcctgccctgatctgtctacaggatgggtagagatggtcacagacatttaggcactttgatcctaagaagaatggaaagaaaccatgtggcgcggcagtcttacaggaatttcaagagggagggacctgagcaacaatcggaggggttattactcctgaggatgcatctggctggagaaagcagcctttgagaactgcctaagaagtatctttacatctacatcagatgtagcctcagaggaaggagtcagtcatagaatggataaaacaaccgcgtgttaaagctttggttataattggtgtggagaatggagaacacagttgatcagcagttgacaaagtggggaaccaacacgaaaacagggctctctcaccctggaaaagccaaaggcagaacaagcctttacatccaggaaggtgggagcaacttgaaatcaaaactctgaaggggagatgattctgttcaatactgaaactcagctgatcaattaactgatgaattctagcaccaaacctgctccctataattttataaccagcctcagagaacctttaaagggattgatcattcactcatttatccagcgaatgtttataaaatgcctaatgtgtcaaacactgttgtgcgtgctgggaatacaacagttggaaattcaggcacaaagactctcattcatggagattacattctactggcaatttcagtgtgtgagctaaattgagtggtgctaactgttgacttggctggttgactgaaacttggactcaaaatttgcctacactaaatgaagtttaaatgccagaaatttcctcatatattataaagtacccaaagataaatggagtttggaatgctagaatgaatttatcatgtaaaatcaagattacccatacctcaaatatgtattccagtagcatctagaagacaatctcttcactgacactgatctggtcacaggaaatagagatatactactgtaagattattttattatacagtaagtgatataatgtccttgaagttagaatgataagttcatgattttctttcagtcagttcaggctactagaaaaaatacaccatagactgactgactgccttaacaaacattcatttctcacgttccagaggctgaggagtctctagaactggactctaaaacacaatcaaggtgttggcaggtctagtgtccagtgagagtccatttcctggtttatgcatggtcatctcattctgtcttcacatggcaaagagcagagaaagagaaaacaaactctcttctgtgttgtctcataagacacataatctcatcatgagggttccactttcaagatgtaattaccttccaaaggtcacacttcctaatgccatcccttagggattaggacttcaacatgtaaatttggagaggacataaatatgcaatccctcacaatgatgtatgctataaaatctcaaggaatcaaatgacaaggatttacagttaataagccaacaaaggagacaatatgtaatataaacacactcagctactctaagggaaagcagaaaaagaagaaaaggagaacaaagaagacatagaataaacaacaaatagtaagttagtaatttaaacctaaaaacatcaatacattgaacgtaaatgatctaaataccccagtaaaaagacagagattgttaactggataaaaaaggaaggcccaactgtatgttgcccactaaacacccactttaaatatgaaagcataaataggttaaaagtaaaaccatgataaataaagatatgaaagatataacagggaaaaacccatgtcaaattattagaggttaaaaattacaatttctgagagaaaacatactttggatgggattaatgacagattaaacactgtggaaaaaagattagtgaactgaaagacatagctatgagaactataaaaaatgaaataatgaagggtaaaataataaaaagcatgaacatcattttcatgtacatatgtgtatacacaaaaagatttgtgaacttgaacaaggcaagagatacaatctaaactacaaagagaacaaaagctaacccctaccttggcccccggagtaagagatatcattctgaggaacaccaagtggaagcctctaaaactgcccccctccccagccaaactctatgatcaagatagtaaatgaaaaacaatattgtgggaggggtagtgaggtttataagatataaaaaagtaaaatatatttcatatcttgtaaaccctactatacatattagtgcagggagccaaaggcccatgggacatgacaaactcagcattccgctggaggctatatgatcaaacagcaaactgtttatcatgaatgcaggatgtgggcaaactcacactgccctgccaccattgccacagttaccatattaacagggcttttcccctgcacatgttcactaggacttaagctgtgacttgctgtggaaggattttccaccttcactgaatccccccgtttctcccttgagtgtattctcttatgtttaacaaggcaagacatatagaagtaagctttctcacactcatcacagccatagggtctctctcccgtgtgagttctgtgatgtacaatgagcattgtctttgtaaggaaggctttcccacagtcactgcatttatagggtttctctcctgagtgaattttctgatgtctaatgagtcctgacttctgtgaacagggttgcccacattcaggacatacaaagggagtctttcctgtatgatatctctgatgtgctacaaggcaagacttctggctgaaggccttgccacagtcaatgcatccataaggtttctctccagtgtgagttcgttgatgtatgttgagattgcccttctgaatgaagccttttccacattcactgcatgtatgaggcttctctcctgtatgagttcgctgatgtacaacgagtagtgattttctggagaaagctctcccacattcgctgcattgatggggcttaattcccgtgtgaatcctttgatgttcagtaagctcagatttcctggggaaggctttcccacattcactgcacccgtatggtttctctcctttgtgagctctctcgtgttcagtgagcctgtacctcttgtagaaggctttcccacacaagctacacccgtggggtttctctcctctgtgagctctctcgtgttcagtgagcctgtacttcttgtagaaggctttcccacacaagctacacacgtggggtttctttcctgtatgaattctcttatgctcagtgagctgagacttcttgaggaaagctttcccacagtcagtgcattcatgggctttctctatgttgtgtgtttgctgatgtttaaggaattgtgacttggtgctgatgggttttctactttcagggaattcaatttccgtaggcatttgttcatgattatcatggagaaaagctccatctccattaaactcagcaggctcctttctgttgtatcttctgctctggttggttaaacctaaatatgatttcaaagttcttccgtgttcatagcgttgtcccgtcctcttcagtattttttggttttgcaagggctgctgcagatgatcatcagctttctcaatttctaagagagagaacaataaatccttccatgatcatcacacggaataaaactgcttcaaagatgccttggggttggctggctttttactggaacccctataataccaacatggaaggaattccaagtataagtgttccctatctgttaaaaaaacttttaagaattgtagttaaatacatataagataaaatttgccagctgggtgcggtggcttatgcctgtaatcccagcactttgagaggccaaggcgggtggatcacaaggtcaagagatcaagaccatcctggccaacatggtgaaaccccatctctactaaaaatacaaaaaaattggctgggcgtggtggcacgtgcctgtagtcccagctactcaggaggttgaggcaggaaaatcgcttgaacctgggagacagaggttgtagcaagccaagatcgctccactgcactccagtctgccaacagagcaagactccatctcaaaaaaaaaaaaaaaatttgccagccaggcacagtggctcatgcctgtaatcccagcactttgggagggtgaggtgggaagatcacttgagcccaggagtttgagaccagcctgggctacaatagggagactgtctctacaaaaactttttttttaatttaaaaaagaataatcctgagtagggaaacagcagacataggtagtagaataaatatcccagaaaggcaagttagaatgttggatacacagcctttgacttcatcctaatcctattagactgttgggtgctaaaatatgcccttctccattctgtagaccatcatcacgctaactttcctagagcaccaatctcatatttccaggaaaactgcagtcaatactctaacctttgttaaaacagagatcacaagactgatggaacagactctttgtagcaataagataccaaactataaactaggtctaaggacatacaggtaagggttaagtcacacaccccctacatttaaagaataaactatgttctaactgccacgagtgttttttgttttgttttgttttgtttctttttctgtagcagctaaacaaacactggccttgggacaagcaatattgaaacaattgcagctcccggaccaccagatgctgactaactgatgcccctcacccccaacagcattccacaggccataactgcagctatgattggacaggagactgatctcaatatccttctcctgataaacaccagctgttttggtcagctgccggagtctgtgcagacttttcttatatcctgtaaaagacctgctagcatacagtcaaattccacctcattttaatgttaaaactccactccaaaatgaaagtggattatatgttacatatatgtttgctcactatgcacatgtttgctgattctcataaagatattcataagactccccatctctcactgaataggtatgcaaagcaaatcctagaaggcaaaaagcctcctgcaaggcaaaaaaaaaaaagtttcccctcttcagtgatgtgtgttttttccacttcctcaaagtcacaccactcagatctgcgaatcatcttttgttagaatataaagtttctctttgcctcctcaattttttggttaacaccttgtatctacctggctatgatatattctcatatgttccaacagaaagagaaacagggtgatccctatggactttcagaacatgcaagcagaacacgtggtcctctccacacagctctgccactgcaccaaatatggaaactgtcaccttcttcatcatgccctacttgcacagatgtcatattggattttttttccactttgctgtccctaatatactaattcctcaccttgccactaacagcctctactctctgaattttgtacttatgtctctgttggcatcggtgaatggagccctcaaggaccacctccctacttctgaatcaagacttgaggcagctttacttttagtttttcttagaacatcagctatacagtatgattgctatagtactgccaccaggtgaaaggtaagctctacctagagctagaaaaatacaaaactttacctccaccactaccctgaattactggcacagaaaattcacagcaggagctgaacaataaaagttttaccattaccatgacgcatccactttaagttcccacttcaccatttcccagcaaatatcttctaactgtggcctccatgtgaccagtttcaagctaatcttttttttttctttttttttgagatggagtcttgctctgtcacccaggctggagtacagtggcacgatcttggctcacttcaacctccgcctcccaggttcaagcaattctcctgcctcagtctcccgagcagctgggatgacaggcacgtgccaccacgcctggctaattttttgtattttatgtagagacagggtttcaccacattggccagactggtctcaaactcctgacctcaggtgatctgcccaactcggcctcccaaagtgctgggattacaggcatgagccaccgcacccggccttcaggctaatcttctgacagtccccacatggccttgcatttccagttctacaacttcttgtcatatgtcttcatcttaattcaatacctagctatgtctcttgcataagatattttatcagtctgtctttctccatcttgtctagaccactgtaggttacatttcttctaaagtcctacaattctttctgtatttactattcactttaactttgtatagccctgaattgtaacaaaaacatttcacacgttcaaaagtttaatttgtaaatattacataaaaatttgccctatttttgctaacaaaatctttgctcaagaaagacatttctgtttctcactaaattcagtctcttctactgtgtattatggctacagttcatcaactcataaaaacagcccccgagagagcttcatgtaaagacacgcccaggcccccaactcaattctaacaaaaccagactcacagagcaagaggccttggtatggacagtgtcatgaaaactcctttaataaagatctagcctttaagaaatgcttaatagatggaaaagtatgacctctcttcagcctggctaatctgtccttcgatgaagaaatgcatgaatgaccaagatgtatttcaatcttacatgaagaagaatgaaaaccaggcccttgactccagagtagcaaaggaacctcaagcaccaccaaatcacactgatgtggtatctatgggagtggcttgtgtgtgattgggatgcaaagtagaatgggaatttagacatggaagatattattatattgtagtgtattaaaaaccatttcatgaaaagaaaattcaaggtgaaaaatacatagtgtcagaatgtgaaaaacaaaccataatcacataccgatgcctcagtttttttgtttttttgtttttcgtttctttttgttttttgaaacagagtctcactctgtcacccaggctggagtgaaatggcgcgatctcagctcactgcaacctctgcctcctgggttcaagtaattctcctgcctcagcctcctgagtagctgggactacaggcacatgtcaccacgcccggctaatttttgtatttttagtagagatggggtttcaccatgttggcaaagctggtctcaaactcctgactttgtgatccgcccgcctcagcctcccaaagtgctgggattacaggtgtgagccaccatgcccggcctcctatgcctcagttcttatctcacttgatgaatcagtaactctagacaatgcttatggcactctttctccctctctctcttatataaatgtatatatacatataaatatataaagtatatatataaatgtatatacacacatacacacacacatacacatatatacacacacgcatatacatataaatgctgttctagcaaattaatcaaacttgaggagagggtcttgggaacccctactttacagctggttggtcagaagctgaggtgacaacctgggacttgccactggcatctgaagtgggacacagtcttggactgagcccttaaccggtgggatctgatgccgtatcaggtagatagggtcagagctgatttgaaacagacgatacccagctgatgtctgctggagaattgcctgggctgtgagaaaacaacccctatatatccagtggcataaatgctgtgttgagtgactatgtgacagagaaaaaaacagtttgtcgtttttgcctcagaaacacaaaatgatcctctgacaagtgatgaagaagaatgggaagatgtgaaaatccaagcaagaagaacttaggggaagcaactcaacatctaagaagaaatgaatagggatcagttccaagaagagataaaggggtatgtatgcttctctgaattcctataagaaaaagagctcttgtatcctaggggagaagaagatgtggcagctgtttctgtctccctagacactttcacaactgtcatgccttctctaaatgaccagaatgtgacttccgctgccttcccctcttgctggttctctctcacttacctgggtgggctggactgtggatttcatcttctagtgtccatagtggttctccttgttccaacttggtgagggcatcaggtttgccggcttgataccctgtttgtgggaaatgggagaagacttaggctcactgaattgcaccacgtggctctgatgataggagaaaggtacatgttagggactgcataatttgcatgttagcaaattaaaggctttttttctaagacgaaggaagattatgcctcttcctgtgggaccagagacgggcctgaggatctgccatttgggagcacagcagacataccaaagcttccagaagctgagaaagcaaaggccactgactgggtaccctctgagtgacacagggcagctgtcctcacccactgacacaaggttgctgtagttctccaacatcacatcccggtacaggtccttctgagcagggctcaggaactgccactcctcccaggtgaagtccacagccacatcctccagggtcagtgattcctgtaataacacagtcctgcttaatatgtttctcttttattgacatggaagaaatatgaagttgttcggcccattttcaccacataagctgcacctgcacagttgtcccttggtatactcaatggaatggtttcaggatgccccacatataccgaaattgtgcatactcatgacctacagttggcctagtggaatctgcttatgttactctgtataagcgagtttcacatcctgagaatactatatttttgattcaagtttggatataagtggacccttgcagtacaaattcatgttcacaaataaactgtattcctagttttttaaatatactgtgaaagaagcaaagtcatagtaaaatattctatattttataataaccatgcagccatccattaatccaacaaatcataagtttctgtaatatgcagccattaaatcctcttgctaacatgagaatgtctgcagtgtttttcagcacctacttgcaaccctaaactatatgctacagtcatatagtacgtgcagaataatctagcatgacccccttcatgtaaactataccatgatatttagcaaaacaacaaataaactatgcagtggccataaaaaataagccatcatacatgtaagcattgacatgcatagatacatgtatatgtatacaacgcatgtatacacacacatacacacgcatgcagacatagatgtcctcacaggtaaatccctagaacaggaagacaagcatttgttagtgacatactagggaattaggaaaaaaagtatacagagggggaactttgttttcacactatgtgtactatttaacttgagtctttcacattgaaaatctatccatgaggccgggcatgatgtctcacgcctgtaaacccagcactttgggaggcaaaggtgggcggatcacccgaggtcaggagtttgagaccagcctggctaacatggctaaacatggtctctactaaaaatacaaaaattaggtgggcatggtggcacctagatgaagcatgagaatcgcttgaacccaggatgcagaggttgcagtgagcgaagatcacgccactgcactccagcctgggcaacaaagtaagactgtctcaaaaaaaaaaaaaaaaaaaactatgaatctgtggttctttctgacaccaaatacacagtgtcttttccagcaacactttctctgatgccaactgggtatcctagagttcgatgctatgctaacactaaccgctgagggttatcatcagactctgcaggtttcagggctcggtcccacaagactgccctcacatcatgtgccactctggggtccccacgttatcacacttctgtccaacttgaccacaactggaggttgccacaacctccctgctcaggttcgataatttgctagaatgactcacagaactcaggaaaatgtcacacaattacagtttattatataggatacaaatgacagccaggtaaagaggtacagaagtcaaggtccaaagggtgccaagcacaggagcctctgatcccatggaattgcagtgcccccttcccccaccccccacttccacatgtgatctccaaaccccatgggggtttttatggagcttctacgacgtgggcatgattaaatcatcaaccatggctgggtgcggtggctcacacctgtaatcccaacactttgggaggccgaggtgggcagatcatgaggtcaagagatcgagaccatcctggccaagatattgaaaccctgtctctactaaaaaaaaaaaaaaattagctgggtgtggtggtttgtacctgtggttccagctactcaggaggctgaggcaggagaattgcttgaacccagaaggtggaggatgcagtgagccgaggttgcaccactgcactccagcctggcaacagagcaagactccatctcattaaaaaataaaaaataaaaaaaagaaatcatcaaccattggtcacagaatctggaggtcgggggtgggactgaaagtcccaactctgtaatcaaggcttggtctttctggcaaccagccccatcctgaggttgtctaggagcccattctgagccacctcattaccataaactcaggtgtggttgaaaggcactggttatgaagaacaaaatacactcctatcactcaggaaattccaaaggttttaggagctctgtgccaagaaccagagacagagaccaaatatatatacgtgtaaaaccataatgagtcatttgcataattttttaagttaaggcattaaaagaggtgagaggttaataactggatttgaacacagggaagggctctgtattttctgagacaacatgacattctaaagcaaaccctgtggatctcaacaacccaagccattgccaaagagaactttcaactccctttggtcaaatctgtacttaaacaccagtttagtgacctgttcatggagctcctttgaaagcaaaccttgcattttttaggcaattaggtttactcacagataaacacagactgcaacaaggttgggtatataggccgcagtgctgtgagctctggaaaaactgtgttcattaaacccttcttggtatagtcccatagaggactcagaataatcatgtagaaacagtcacacaaaacttgcttgtgtatcttttggaaaaatgctgttaaggacaaaaagtctatcttgtcacctctagcaaaaagcatcaaactaatttcccaagatttaagtgccatgaaatactgacatcccctgaggaacggacccgctttctcctcagaatcagtgcacatcatgtaacttaccatgattctctgggtgtgatggtggccaaagattttggacacaagctgacacttaatgtagccaacagggtctggcagagtcgcacattatattccaacactggtcacatgtgaactatgtgaacaaagtatttgtgatcccactttgtcctggattaaaggtacagtctaagtctgtttctccccagagctcattttttccaatttatacttttaatgtaaatgaactgatttcttcagacttccacaaatccatcagggaatcgagttaagaataaaacaaaccaaaagttacctgggcctttgtcattttcttctgtttcaggaaatacccaagaactgggatgcttcgtctttggtttcttctggatcctccctaaattttggctaagaaatctgagtctccatttaagagtgttcccagaaatgatgacatccacatccaggaacctcctccttccttcatttgaactctcttgcttctggggagccaggacctatggagtaaaaatcaagttcatttggtgacacattccctccgggcccagatgctgtctctgctgctgtaaactctcctgcagtcaaggccaagcaatatatctaagcatccctttgtcaggtgtccccaagtctttacatcccagggcaataaaacaacactctgaatgtggggagtcatatggcagtgggcttaaccaggagccggcatatctggccactttccaatgcttcaaaggagtgtctttctccttaagcacagtgtttataaataagagagcaggtcacgctctggtcatgagaacgtgatggtaataaggaggctttcctcctcagaggcctcctgtgattttccaaaacttattgtcccatatttttatggccagtttatgccagcaccccataagcctttttcccaacaatcgtgagacacacagagaagaaacacacaggtaaaagagaaggccatgtgaagatggaggcagagactggagtgatgctgccacaagccaaggacacctgagagtctgttagaaaaggggagacaggtgaatgaatgtgggcagctgtgccggagcccctcaagaccactcccagatgcagtgattcactaggtgaactcacaacactcagtctataattatattcatggcaaccacttattactgtgaaaacatacacagcaaaaccagcaaaggtaaaaggtacatgtggcaaagtctggaggaaaccagacataagtttcaagttcagtctctttggagtcacacaggatacacttaattccccgagccacaagtcatgacaacacacgtgaaatgctatagaccaaggaagtttattagagagagattgtgtgccatggtttttattgggggctgatcgtgaaggtgctcactgcctaacattcaccaaaactccagaatcctagaggaaagcatgtgttcaggataaatcacattgtttgaaaaaaacagcttaggcacagtgagccactcttattaggaaatagtgggactgcctccaaaaatctaagctcccaaatgccagctgctatggtttgaatgtttgtgtcctccaaaattcatgttgaaacttaatctccaatgcaatggtatcaagaggtgggcttttagtaagtgattaggtcatgagggctcctcccttgtgagtggcattaaggcccttataaaagaggctttggccaggcacagtggctcatgcatgtaatcccagcactttgggaggctgaggtgggaggatcgcttgaggccaggagtttgaggctgcagtgagttgtgattgcaccactgcactctagcctgggcaacagagcaagaccctgtctcttaaaaataaaaaaataaaaaaaaataaaggccgagcgtgttggctcacacctgtaatcccagtactttgggaggccaaggtgggcagatcacttgagctcaggacttggcaacatggtgaaaccccatctctataaaacatacaaaaattattcaagcatggtggcacatgcctgtattcccagctactcagatggctgcggcaggaggactgcttgagcctgggaggttgagaggttgagactgcagtgagttaggatggtgccactgcactgcaggctgggtgacaaagtgagactctgtatcaaaaaaaaaaaaaaaaaaaaacctaaagaaagaagaaataataataaaaataaaagaggcttcacacacagatcggccctttctgctcttctgccttctgccatgtgagggcaccgcattcttcacctccaaagaaatagcgacaaaacaccatattgaaagcagaaatcaggccctcaccagacaccaaacctgctggtgcttcgatcttagacttctcagtctccagaactataacaaataaatttctgttgtttataaattatccagtctcagctatcttgttatagcagcaccaacaaggctaagacagcatcctataatttaattcagtctgagactgtgtatctagatatagtgtcagacaccacagattaagggctcagttcaagcctgcccccaacttcagacgcaagttgcaagcagcaggttgtcacctgtacctctgatggaccagctataaatcaggattcacacggcctcctcctcaggttcgattaatttgctggatggctcacagaactcaggaaagcacttaacatttactggtttatttcaactcttttcctgtctagaaaaacgaagtgcagctcactgccagcgcttatttcattttacataaacatgctctttgaggctgcagtaaatctgattttcaatgtgaaaataaaatataaaagctgttctaggagttatttctaaacagaactaacatcagaatcatctgaatcatcagaattctcgatttggaatcatcagaattctcgatttggtaaaaatcggatccatccagtgagtcttcagccaagaactgtttgagaatgatgttaacatcacatgtaggaatgctacgttttctaggatttgacattttcagtgatcgagaactactacattttgtaaatggaaataccactactaaaaacagaatgctataagtagaatgatgtcttttgtttcccaaggcgacctactagagcgatgtgaaaataataaaagtgagatcgttcatggcaaagttatctcggggtaaatgctccagctgcaagcaccaaaggtgagtattctcagggcaaatgggaaaaggaataaaggatattacgaaggatacagatgaagaggcagatggaagggatagcacagagcaaggtttgtagcaaggggcgtgggacttccatgccctccacggaagcttattagagactcagttcaccaccctcaggcacctccacatgctcaagaatctgtaagttccccagaagttcaccagtccttttgagtttttacgctggtttcattatgtgggcatacttgattaaaacactaaccactggtgatcaactcaaccttcaacttccctgttgccaggcagagctaaaatttccaaccctcaaatgacatggttagttgccctggcaaccagcctcccccgtcctaaggccagccagaagcccccagtcaccagccatctcaatgccacacaaaaaggcactgtttactgaagaggttccaaggcttttgggagacatgtgccaggaaacaggacaaagatcgattatacatttcttataaatcgtaacaatcatagctaggcgcgatggctcatgcctataatcccagcactttggaaggccgaggcgggcagatcacctgaggtcaggagttcaagaccagcctggccaacgtggtgaaagcctgtctctactaaaaatacaaaaattagccgggcgtggtggcgggcgcctgtaatcccagccactcgggaggctgaggcaggacagtcgctagaacccaggaggcggaggttgcagtgagctgagatcgcaccactgcactccagactggacaacagagctagattccgtctgggggataggaggaaactttgatccccaaatgctcaaggagactgatgcttaagcaaactaaatattgcctgagaacgactccatacttctatatttgagtccttgtggataaactgcaacctagcttaacagacaaaattgaaaaccgaacttaatcgtatgcacctgtaacaatagctgagtggtggccagtcccagcggccatactcatagactgctgaatgttccaactgcgttcaaataaggcaaacgccgaatggtaaccaatctcactgtttctggacctcgcttccgattcctgtatgtcactttaccttttttgtctataaatttgttctgaccacgaggcacccctggagtctctgttaatctgctgtgattctgggggctgcccaattcgcgaatcgttcattgctcaaggaaactcctgtaaatttaattcggcttcaatttttcttttatcactgatttgagtaataataaaactccggtctccccgcacagccggctctgcatgaattgctctttctccattgcaatttccctgtcttaacaagtcggctctgtctaggcagccggcaagggtgggcggttatagtttcacaactcaaccccagccaggggcctgggcttgtaaaataccagattttacaagcctctgagccccacatgcctgggcctccccgaaacacttaacacacatccccgattcaccccaaaacctacaccacacaccctcgtacgctgcccagcaccccggcttcatcaccgactttaaactgcagcatttggagtgataataatggcgtcggtgataaagccggcgtgctgggcagcgtccccctagagttctccatccagtgatccagaggcctactaacagagtgaccctcagagaccccaaactctgacgccgagtctcagtcgctgaactcgacagacctttaacgcccgaccacaagaactctcccacgccggaccgcaaaggcaccccaacccaaaggctccaccgcccaggccgccagctctccccacaggctcctcagaagctccctacccctttaacctactccacggagagacccaaacactcacctgattttcttctggctacacctaaattccctgaatgcttcctttcctggcccttaaaccccggcactggcctatggcggcggacgagggcgcgagtcaattctgccgcgctaggacgatgggacatgggcttctcttcgaggaggtaacatgtccgcgccctgagccacggctctctgggcgcggccatcttggtagatctgccgtacagaagggaaacagttgttcttgtgtcattaaaccgggatgactctcctgaaagcaaaaatttgaggcgcaggagcattttctagagtttatctgaacaaacagcaattcatgaattaggaagcatcaaaccaaaagaagtctcgcgcttctatgcttaaagcattagacacaagtattcacagggtgagtgaaggagtaaaacaaagaaattatttgattagttacaattataaaaatgcatttttttaaatttgccttggaaagtccctaatgacataatagcatgtgagttgcctacttttgatcggttgagattgagttttgtccttccctaacacaagcatttaccagaaatgactcaagtgaattgttgcttatgtttgcaggttaagcaaggttaaggctgtttttaaggcctactgggttttgtttgctcaggagtttttgaattctggtctgcattttaattttgctttgacacaggagacagtgaaatggcactgatgtgttccctctcctgacacctcaacccctgcactgtgaggttggagcactaacaacagtgcactgtggggaaaagaaagagagatcagactgttactgtgtctatgtagaaagaagtagacataagagactccattttgttccgtactaagaaaaattcttctgccttgagatgctgttaatctgtaaccctacccccaaccctgttctcacagagacgtgtgctgtgttgactcaaggtttaatggatttagggctatgcaggatgtgctttgttaaacaaatgcttgaaggcagtatgcttgttaaaagtcatcaccactctctaatctcaagtacccagggacacaatacactgcggaaggccacagggacctctgccccagaaagccaggtattatccaaggtttctccccatgtgatagtctgaaatatggcctcgtgggaagggaaagacctgaccatccctcagcccgacacccgtaaagggtctgtgctgaggaggattagtataagaggaaggaaggcctcttgcagttgagacaagaggaaggcatctgtctcctgctcgtccctgggcaatggaatgtctcggtataaaacccgattgtatgttccatctactgagataggagaaaatcgccttagggctggaggtgagacaagctggcggcaatactgctctttaatgcaccgagacgtttatgtatgtgcatatcaaagcacagcaccttcttcttaagcttgtttatgacacagagacatttgttcacatgttttcctgctgacactctccccactattatcctattgtcctgccacatccccctctccgagatggtagagataatgatcaataaatactgagggactcagagaccggtgccggcgcgggtcctctgtatgctgagcaccggtcccctggacccacttttctttctctatactttgtctctgtatctcttcttttctcagtctctcgtcccacctgacgagaaacacccacagatgtggagaggcaggccaccccttcactgcacaaaccacacagatattcagaggctcaaatgcaaccaaggctgttgcgggaagtcagggaccccaaacggagggaccggctgaagccatggcagaaaaacatggattgtgaagattttatggacatttattagttccccaaattaatacttttgtaatttcttatgcctgtctttactgcaatctgtaaacataaatcgtaaagatttcatggacacttatcacttccccaatcaatatccttgtgatttcctatgcctgtctttgctttaatctcttaatcctgtcagccgagaaggatgtatatcgtctcaggaccctgtaataattgtgttaactacacaaattgtacagcatgtgtgtttgagcaatatgaaatgtgggcaccctgaaaaaagaacaggataacagcaattgttcagggaataagagagagaacctttaactctgaccgccggtgagccgggcggaacagagccatatttgtcttctttcaaaagcaaatgggagaaatatcactgaattccttttctcagcatggaacgtccctgagaaacagaatgcgcacctaggggtaggtctctgaactggcctcccccgggcgtacctgtctcttatggtcgagattgcagaggtgaaataaactccagtctcccatagcgctcccaggcttgttaggaagaggaaattcccgcctaataaactttggtcagaccggttgatctcaaaaccctgtctcctgataagatgttatcaatgacaatggtgcccaaaacttcattagcaattttaatttcacttcggtcctgtggtcctgtgatctcgccctgcctccacttgccttgtgatattctattaccctgttaagtacttgatgtctgtcacccacacctattcgtatcctccctccccttttgaaactccctaataaaaacttgctggtttttgtggcttgtggggcatcacagatcctaccaatgtgtgatgtctcccccggaggcccagctttaaaatttctctcttttgtactctgtccttttatttctcaagccagtcgacgcttaggcaaatagaaaagaacctacgtgattattggggcaggtcccccgatacaaggccagcacagtgccaagtatgtccacctcagtgagctgcggagaggtgactgcaccctttattgactgactactaggaaactgtcaagaggcagcccactgagcatggccatcttaaaggaatttcaggtgtccctacaacagagaatatgccttgagaaagggggaaaaaataggccacttagcttgggtagacaaggctcatgacaagtccctgcatctcagctactgactttaaaagttgtttggggaaaagaaagagagatcagactgttactgtgtctatgtagaaagaagtagacataagaaactccattttgttctgtactaagagaaattcttctgccttgagatgctgttaatctgtaacctgagccccaaccctgtgcccacagagacgtgctgtgttgatgaaggggtgggttgcccctcctcacctgtgggtgtttctcgtaaggtggaacaagagtcttggaaaagaaaagacacagagacaaagtatagggaaagaaattagaggacccggggaaccagcgttcagcatatggaggatcccgccagcctctgagttcccttagtatttattgatcattcatgggtgtttctccgagagggggatgtggcagggtcacaagacaatagtggggagagggtcagcagacaaacacgtgaacaaaggtctttgcatcatagacaaagtaaagaatcaagtgctgtgctttagatatgcatacacataaacatctcaatgccttacagagcagtattgctgcccgcatgtcccacctccagccctaaggcggtttttccctatctcagtagatggaacgtacaatcgggttttataccaagacattccattgcccagggacaggcaggaggcagatgccttcctcttgtctcaactgcaagaggcatgccttcctcttatactaatcctcctcagcacagaccctttacgggtgtcgggctgggggacggtcaggtcttttccttcccacgaggccatatttcagactatcacatggggagaaaccttggacaatacctggctttcctaggcagaggtccctgcggccttccgcagtgtttgtgtccctgggtacttgagattagggagtggtgatgactcttaaggagcatgctgccttcaagcatctgtttaacaaagcacatcttgcaccgcccttaatccatttaaccctgagttgacacagcacatgtttccgagagcatggggttggcggtaaggtcatagattaacagaatctcatggcagaagaatttttcttagtacagaacaaaatggagtctcctatgtctacttctttctacacagacacagtaacaatctgatctctcttgcttttccccacagttgacttaaggtttaatggatttagggctgtgcaggatgtggtttgttaaaaaagtgcttgaaggcagtatgtttggtaaaagtcatagccattctctaatctcgagtactcagggactcaatgcactgcagaaggctgcagggacctctgcccaggaaagccaggtattgtccaaggtttctccccatgtgatagcctgagatatgtcctcatgggaagggaaagacctgactgtcccccagcccaacacccgtaaagggtctgtgctgaggaggattagtgaaagagggaggcctctttgccgttgagataagaggaaggcacctgtctcctgtttgtccctgggaatggaatgtctcggtgtaaaacccgaacgttcgttctatttactgagataggagaaaactgccttatggctggaggtgagacatactggcggcaatactgctctttactgcactaaaatttttgtgaaaagtcagacataaatctggcctatgtgcgcatcgaggcacagcacctttccttaaacttatttatcacagagatctttgctcacttgttttcctgctgaccctctccccaccattaccctattgtcctgccacatccccctcatcgagatggtagaaatagtgatcaataaatactgagggaactcagagaccagtgccggcgtgggtcctccgtatgctgagcgccggtcccctgggcccactgttctttctctatactttgtctctgtgtcttatttcttttctcagtctctcatcccacctgacgagaaacacccacaggtgtggaggggctggcccccttcagttgtgaggatcaatatgtatactcatattaaagattgttttttgcttcaggctgtttggaaaacaccaagcgtagaaacttgaaattgtgttctatgaaaaaactggataccaaagccactatcaaggtaggaggtgggacttgactcaagagaccaggctccaacaccagacaaaattaaggactagctaaaacagcaacagggcagaagcagcttttcataagacttacccaccagtatgccatgtcacgtttaccatttccatggtaacacctgggagttattgctgctttccatgacaacaagctgatgacctgaaagttaccacctttttctagaaatttatgcataatccaccccttactttgcatataattaaaagtgggtagaaatatgactgaagggctgcctctgagctgctactctgggcatactgctccacaaggagtagtacctctgctgctgctgtgcactgccacttcaataaaagttgctatcaaaggctgggtgcagtggttcatgcctgtaatcccaacaatttgggaggctgaggcaggcggatcacgaggtcaggagtttgagaccagcctggccaatatggtgaatcaccatctctactaaaaatacaaaaattagactggagaccatcattctcagcaaagtatcacaaggatagaaaaccaaacaccgcatgttctcactcataagtgggagttgaacaatgagaacacacggacacagggaggggaacatcacacattggggcctgtcgggggtgggggactaggggagggatagcattgggagaaatacctaatgtaaatgacgagctcatgggtgcagcaaaccaacatggcacatgtatacctatgtaacgaacctgcacgttatgaacgtgtgccctagaacttaaagtatatttttaaaaaatacaaaaattagctgggcatggtggcgcgtgcctgtagtcccagctacgcaggaggctgaggcaggagaatcacttgaacctgggaggcggaggttgcagtgagctgagatcgcgccactgcactctagcctggaagacagagtaagactccatctcaaaaaaaaaaaagttgctatctaacatcactgtgggacccctgaattcttttgaaatgtaagatgaagtctttttgcaaaatggagttagttatgtcaagagtgctctgtacatgttgcgaactcaaaacagacaactccccattttctctctttttttcccccctgagatggggagtctcaccttgttgcctggagtgcaatgggacgatcttggctcactgcaatctcgtgacccactatgcttggccttaatattttctactatagtttatgctaaatctttttagagaaatccttccccacatcaagatcataaaaatattatcttatatttccttctaacacttttagagttttgctgttcaattcagggttccaggggttagcaaactgctgctcatgagccatatccagtccacagcctgctttgcccttgagctaagattggcttttaatacttttaaagagtaaaataaatagaatatacaacagagatcatatgtagcctgcaaagcctgaatacttactatctggtcttgcaccaaaatagtctgctgacttttatagtctaatacacgaaacattgatttgtgtaggatatgaagtggcacctgtaatcccagctacttgggaggctgaggcaggagaattgcttgaacctgggagacagaggttgcagtgagtggagactgcaccactgcactccagcgtgggcaacaaagtgagactccaactcaaagaaaagaaaaaaaaatcccaaaactccccttaagatgcatataccagcttacctacaatatctttttttttttttttttttttgagacagtcttgctgtcacctaggctggagtgtagtggtgcgatgtcagctcactgcaacctctgcctcctgggttcaagtgattttcctgcctcagcctcccaagtagctgggattacaggtgtgcatcaccacatcctgctaatttttgtatttttattaaagacagggtttcaccatgttggccaggctggtctcgaactcctgaccacaagtgatccactcgcctcggcctccaagagtgctgggattacaggtgtgagccactgcacctggcctgtcttttgaaaataggtggatgatctaactctgttttaaaagcctgattttggctgcaacttgtgtatataaaagacttctcagcaatcttgtgccttggttcccctgaaacaggtacctcacctatatttggtagttggtgatctggagacaaatagtatcctgtgtgactgaaaaagatccctggaatctgtgcctgtgtgtctcagaacatcatcatatttacatgtattttatttcattggattttatttttcatgctgtactgtagcctttgtctttcttggagtcttaggtaagtataacttgtggagtcatgtgagactgttcaacatcttaccctgagtaactgctataattgcagtcacctattttagggaaaaacattgtacttgaaaaggaaacatatttttgtaaaattaatatcaagttcagtgtattttataatttattctcaatttaagaaaaccgtttaggggactttgctgctacattctagagagggattaataaaaacatgtctcacatttggcttatgttgtttcaaagggaaacacatcttgcacaccttgtggctatgaaggaaagagaggcttattttatttgactataggatcaagccacattatctattcatgcaataaaaccaggactgcaaaaattatttaatttccatctctctgatatcagggactatctctcaaactatttagaattcagaagcggcataaaacctgtgaagactcatcttcctcaatccccaagtatttcgttggtttacaagaaacaaaaccctgtataaagatgacggcttctactatatttcatccaatctgagatacctttggttgtatggcacaccacacttttacacaccaagttctccatttaaatatgttaagccacatatataaataagtatgccacacttaaattttagcagtggtaatatgttggaaaaatgtctatcttagaattgatgagataaagttttacccaagagtggcacaacatcttccagacccatttacaaatactagcaaacactacagagataaagataaacagtattgtattgagttttttactgaaacaatgaaccacagcagttctgtggggagtcgaaagcctgagggtcgtgaccaattcagcattccactgcaggctatatgatcaaacagcaaactgtttatcatgaatgcagaatgtgggcaaactcgtatctgcacctgccaccagaaagtatgctgagggcaatcactgcctggcaccatgctccttgaggttatctactgggacatctggagcctactgttcaaagaatgcagtcatgcaggcctgcactaaatcaagcagctgaccgacaaccacccccgctccttgttttctttactcaataaatatgaagtgctatagaagctcaggggccttgttcactagaagcaagaagcccccgaccccttcttccaaacatattcttttgtgtttgtctttattcccacattcatcctcctttgttcagtccagtagggtccgtggcacagatcaattataagttacgtagcattatacaaagattcaatgcagatattctatgggaagtctttatgcacatttaatcatacatactacaaattcacaattgtgatgttaacacatgcagttcccaaatatgagcaatcatttttacaataaaaataggcaaaaacacttaaatatttggtattgttcttatattttttgctttgttttctgacaagcatatttatttacatatttaatacaatactttctataatgctgattatataacaagagcagaaaaaaaatacagatgaaagcatgatttcccagattcattaacatacaaaattacaaatttcttttttcttttccttatttatttatttattttttttttttagacaggctgtcacccaggctggcaaaatcttggctcactgaaacctccacctcttggctcaagtaattctctgcctcagcctcctgagtagcactatctccagctaatttttgtatttttttgtagagatggaaccctatgttgaaaacactggtctcgaactcctaagctcaaacgatccttccaatttggcctcccaaagtgctgagattacaggtgtgagccactgcacctcacctaaagtacagaatttcttccttagtgtcaattatctgaaactgatgtaactgcatattatgccaacaacatccccataatcagtaatacatagatgttccttcctgtgtgttccctctggcttatattcaattgacatttattgaaacaggtattacctcctgactggcatcatgcccagcactattctctgataagaaaggatgtgtaagcttgaaattaaggtttgttcacatttgctgcagccttgaggtttcactcttacattaaccttgtggtataatgagctagtccttctcactgccaactttcagatattcacttcatttatgatttctctcctttgtgtgttttctgatgtagaatgaggctgaatttgcggaagaaggttttccaacactcagtgcattcgtaaggtttctcacctatatgcgttctttgatgtataataagatgtgacttctgggcaaaagatttctgacatttgctgcattcgtggagtttctctcctgtatgtgttttctgatgtcaaaccaagctaaacttgacggggaaagttttcccacattcactgcatccataggatttctctcctgtatggattctctgatgagtagtgagactaaacttacgagagaaagtcttcccgcactcaaggcattcgtaaggcttctctcctgagtgaattctctgatggatcaggagataggacttccggctgaaggctttgtgacattctccacattcctaaggtttctctccagtgtgagaccgctgatgaatattcaggtgtgacttttggctgaaagtcttctgacactgactgcattcatagggtttttcccctgtatgagttctttggtgtaggatgagactaaacttgatggagaacattttcccacattcgttgcatccatagggtttctctcccatatgagttctccagtgagtattgaggaatgactttacactaaagccttttccacattcactgcagtgatacggtttctctcctgtgtgagttctctgatgtctactgagctcagatctctggatgaaggctttcccacattcattacacccatgcgatttttccccggtatggattttttgatgtaaaatgaggttaaacttaagggggaatgttttcccacactcatcacaaccatagggtttctcttctgtgtgagctctctgatggatcatgagctgtgacttattgctgaagcttttctgacatttgctgcatccatagggtttctctccagtatgagttctttgatggaaagtgagttttgacttatcactaaaacctttttgacatgtatgacactcaaagcatttctctcctgtgtgagttcgttgatgtttattaaggcatgacttatcagtaaaagctttcccacatttattgcactcataaggtttctcttctgtatgggttctctcgtgtaaaatgagacaggacttccatctgaaggctgtctgacatctactgcatccatagggcttctctcctctttgtgttctttgatgcttaaagaggtccaacttctgggaaaaggctttcccacagtcactgcagtcatactgtttctctcgtttttgagttttccagtgttttatgagctgtgacttatgactgaaagcctttacacgttcattatattcattgtatttctcttcagcatgaattttctcatgcttaggataaagaaaaactttgtcatatccattacattcaccttcatttcttgcatagcttctgttttgaataaagtactctagattaggattcaggtgtttcccaagtacaaaaggggtatgaaggtttgagctcagatgagatgttatgttgccaaatatatgatatttgtggtgtctgtccatagtttcaaggctgctttggttttctcggtgccattctgtgtgatcattgacttgccaggcatcttctagaaaggagaccaattaatccactgtgatcatgtaataaaaggagtagaagctcacagcaagagccaaggagagaagaggaagtgaaactgtgggtagagaatgaaagtctgagatatttataaatggaagaagaaaaaacagaagaaactatgagaggtatgaaacacatacaaaatgaagataagggaggaaaatttaggaatacttgaaaatagggctatgactatgaattagggggatgaagacagggaaaagcaagtaaactaaagatgccagggagaaagattaaccaggaaagcaagttctgagatgagccagagagggatttgatcagagtacctaaaagaagaacatggattcttttaaaagccaagcaaaagagttctaatatggagcaactaaaaagtggaggcagtattaaggtatgtgaggagcttatgtcagctgttcttagtcacattcacaactttaagaacttcaaaaacatttctccaaacagcatttcagagatgcccccctacttctgttcaactgggatattactttaagttctcctataggactggtttttcacttacctggacaaacctgactctggatttcttcctctagtatccatggttttccttgctccaaccagaataatgtgtctgctttggtaacttgataccctagaaaagtatcaaggaaaattataaaggacacatgaatgcaaatactagggctacaagacttctgaaaaatgatgaagattacttttttttttttttttgagatggagtctcactctgtcaccaggctggagtgaagtggtgtgatcttagctcactgcaacctctacctcccgggttcaagtgattctcctgcctcagcctcccaagtagctgggactacaggtgtgcgccaccacacccagctaatatttgtatttttagtacagacggggtttcaccatgttggccaggatggtctcaatctcttaacctcatgatccacccctcttggcctcccaaagtgctgggattataggcatgagccaccatgcctggccgaagattacatttaaggggttaaataatttgcatctgggccaagtaaaggccttaacgtccattggaaatgagagaaaaacactctgttagaggccagaaaagtactaaaaatctatgatgtattaaactgaagtctaaaaaaagtaaagtatttgtgaggccccacgctttttaattactcagaaaggaagggcaattgattgcctacactacccaggaaaactgtgcttacccagtgataccaggttgctataattttccaacatcacgtcttggtacagattcttctgaacagggtccagtagctgccattcttcccaggtgaaacccacagctacatccttgaatgacagtgagccctgtaatagaacattcctactcaattctaaaggattaccattgtgtaatgctatgaacataaatgataatttcttataatacattttcccagagtaagttatttggctgccttccatgtaactagttttgccttataatatataggaaaaatgttttagttaaaatatcctatttcggtacttccattcattcactgattcacatatttaattattcattcacaaaagagaaacagaacctccttacatcctttaataaaatatttaatctgcaacagcagtccccaactttttcggcaccagggactcgttttgtggaagacaatttttccacatactggggcaaggggatggttttggaatgattcaagtgcattacattaattgtgtactttatttctattattattacattgtaatatataatgaaataattatacaactcaccataatgtagaatcagtggtagtcctgagcttgttttcctgaaactagatggttccagctgggggtgatgggagacagtgacagatcatcagacatcagagtctcataaggagtgtgcaacctagatccctcgcatgtgcagttcataacaggattttcactcctagaagaatctaatgctgcctctcatctgacaggaaggggagctcaggcagttatgtgtatgatagggagtggctgtaaatacagataaagcttgctcactgacctggtccacttcctaacaggccacagaccagtggcaggggttgggaagccctgttctagagaatcattgagcctgagggtgggcaagggacactcaactaaaattcactcaaattcacatttagatatgtcaatgctgatacaggaaaccataagaatacacaaaaatgtttcaagattgattattttaaagatggtgaaaaaggattaagagggaactttcaggttttgcactataaaattctatattgtttgaaagtttgacactgcaaatttttttttaattcattcaagttggagaagtattataatgatgatgattttgtttagagacagggtattgctctgttacccaggctggaaggcagtggcatgatcacagctcactgcagccttgacctcctaggctcaagcaatcctcccacctcagcctcctgagtagctggaactacaggtgtgtgccaccgtgctcagctaacttttgtatttttttgtagagacagggtcttactatgttgcccaggctggtctcaaattcctgggctcaagtgatcttcccacctcagcctcctaaagtgctgggattacaagtgtgagccaccatcgcccagctcacattgtgaatattttaagcttcatttatataactggaattttaaaaaaataagtagataagtattggctttgaacagagagctaacactgcattcttgggtgtgaagagattatgaagggaaactctaagactctgtcaacataacttggaactgtttactaatcaatgtaaataggagtttctctacctcagcactacaggttgagcatccctgcttcaaaattctgaaacctataatgctccaaaatctgaaattctttttagggctgaggtgatgcacaaaggtcatgcttgaaggaaatgcttaccaggacatttcaaatgttggattttcagattagggatgctcaactagtaagtataagtaagtaagtaagcaagcattctgaaaaaaaaaaaaatctaaaatctgaaacacttccagtcccaagcatttctgataggggatgctcaatctgcatttgttggaggccgagaaaatgggggttgtgaccaacccagtataccactggaggctatatgagcaaacagaaaactgttctcatgaaagcaggatgttggaaaactgacaaattgcatctgccaccagaaggagtgccaagagcagtcacaccccaggcagagtgttccttgtggtttgtagggagccaaaggcccatgggacatgatcagctcagcattccactggaagctacatgatcaaacagcaaactgtttatcacaaatgcaggatatgggcaaactcacgactgtgcctgctgacagaaagtttgctggcggctatcattccctggcgctgaggttatctgctgggacatctagagcctgttgtttgaggaatgcaatcttgcaagcctactctggaccaaccaactgaccccttcttccacaccccttctcactatcccttttgcctaataaatacaaagggctgtgtaaagctcagagcctttgtccactagaggcaaggtgctccttgaccccttcttccaaatatactcttttgtctcgtcttttattcccgcatttgccccactttgttcagcccaccagggattgtggcaggttacatagtggccccccccaaacagtgacagaatcgagtgctccacagtggttatctataggaacatctgaagcctgttgtataaagaaagtaattatgtgtacctctaatgaatcaaagcagctgaccaaccgttacctctctctccctattgattctacctaatacatatgaagggctgtagaagctgagggctgtctttgctcactagaagcaaggagtcccctgaccccttcttttaaaatgtatctttttgtctttgtcttcacttctgcatttgtcccatttcgttcaatcccataggaacagactgtaacaggcattgacattttggtttggagaattctttattttggggcactgtagtgtcattgtaggatgcttagcagcattcttagcctctatccactagctccaattagcacaccctcctttcccaggtgtgacaatcaaaaatttctccagacattgccaaatgtcacctggggtcaaaaaatgaaaaccactgataaaaaaaaaagcagaatattgaggactctttgtggaagaccatatgatggtcatagaatccatccatcttaaaaatctctacattttatccctgaataaaaacagacccccaggaggctgtggactttggctacactgttctgggtccctgaagcactctgatcactgagtttggttttggtattacaccactggcttatctgtgggggcactaacttctatatgatctatatcatgacccatcaaagaaatttcttcttaagtaacatgaaatattcacttttctagaggagctttctcctcagggaaaaggaaacgatttgttattgtgtccatgtggtagactgcatttcccaaagatgaccacaataatatctcacattccaaagaaaaccttctgctaaatcttgccactcccacacgaagagatggagcctattcccttcccccttgaacctagctagtcttggtgatttgcttgtacctgcagaatacaacagaggtgacacaacataacttccgaggctaaggcagaaaagcatgggggaaagaatgagagatcagactattactgcatctatgtagaaaaaggaagacaaaagaaactccattttgatctgtactaagagaaattattctgccttgagatgctgttaatctgtaaccctagccccaaccctatgcttgcagaaacatgtattgtattgactcaaggtttaatggacttagggctgtgcaggatgtgccttggtaaaaatgtgtttgcaggcagtatgcttggtaaaagtcatggccattctccagtctcgagtacccagggacacaatgcactgcagaaagccacagggatctctgcccaagaaagcctgtgtattgtccaaggtttctctccactgagacagcctgagatatggcctcatggaaagagaaagaccagactgtcccccagcctgacacccataaagggtctgtgctgaggaggattagtgaaagaggaagacctctttgcagttgagataagaggaaggtatctctctcctgctcatccctgggaatggaatgtgtcagtgtaaaacccgatcgtacattctatttactgagataggagaaaactgccttatggctggaggtgagacatggtgggggcaatactgtctttacttcactgagatgtttgtgtaaagtcaaagataaatctggcctatgtgcatatcaaggcacagcacctttccttaaacttatttataacacagagtcctttgctcacgttttcctgctgaccctcttcccaccattaccctatagtcctcccacatccccctcaccgagatagtagagatagtaatcaataaatactgagggaactcagagaccagtgttggtgcgggtcctccgtatgttgagtgccggttccctgggcccacttttcttcctcgatagtttgtctctgtgtcttatttcttttctcagtctctcgtctccaccttgtgagaaatacccacaggtgtggaggggcaggcctccttcatctggcacccaacatggggcacgaacccatgaccctgagattaagagtctcatgctctaccgactgagctagctgcagaatgcaacagaggtgacacaacataacttctgaggctaaggcagaaaaggccctgtggccgcatcttggctgtctcagagccagcatcatgctgtgagaagcccatccatgtcacatgtggaggtcacacacaggtgctctggctggcagcctccttgagcctagttttcaagtaatcccagcctggcacacagatacagagaggaagaagccttcagatgattccagtccccaaccttctgagtcttccagttgagattcaagacatcatggtgtgaagacaagctgtgcagtaaaggataaacagagcgagtctgggttacccagaaactgaacattccaaagaaaggctcagcccttccctatacctggcaggtaacttctaaaccaagcttgtccaacctgcggaccatggggtgcacatggcccaggagggctttgttttgttgttgttggtggtggtgcacacagcccaggagggctttgttttgttgttgttgttgttgtttttgttgtttgagatggagtttcactctgttgcccaggctggagtgcaggggcacaatctcagctcactgcaacctccaactctcaagttcaagcgattctcccacattcgagcaattctcctacttcagcctcccaagtagctgagattacaggcatgtgccaccatgcccagatagttttttgtatttttagtagagacggggtttcaccatattggcaagcctggtctggaactactgacctcaagtgatctgcccacttcagcctcccaaagtgctgggattacaggcataagccactgtgcctggcctccaggagggctttgaatgcaaaacaaatttgtaaactttcttaaaacattatgagattttttgagttttttttcttttttctttaagctcatcagctattgttagtgttagtatattttatgtgtggcccaagacaattcttcttccagtgtggcccagggaagccaaaagactgcacactcctactctaagccgttggaatatattgtccgatgagggtctttgtttactgggagccttgggtcacacaagatcgtctatgctaacaatgtatgatggaagccttgggccacactgtagttatggtggcctctgaaagggctgaagaataaggtcagccactcatgtgctcagcctcacccatataactaaagccaaataaaaaccctggacacccaggctcaagtgggcttcctgtactggcaatacatcatgcctgtcgtcacacatcatggctaggacaatcaaacattgtccatatgactccacagagagaggaaaactcaaagcttctgcacagcatctcccaaaccctgccctacacacctttctctgtttctgattttaactgtatccagtctatgtaataaaataaaatcatgaatatgacagttttgctgagctctgtgttattctaacaaattattgaacctgaggaaccccagatcttgcgatccccagaacatacaagccatcaccatgtctcacttcctgactcagtgaatccatgcagatcataaaagtaaattcacatctctaggtcttgggctggcttgctatatagcaacagattacttggaatagggaaacagtcataacaacattttagtccatgatgggttgcacacacaatggtggtcccttaagattataatggagctgccaacaaacatatgaaaaaaagcttatcatcactggtcattagagaaatgcaaatcaaaaccacaatgagataccatctcatgccagttagaatggcaatcatcaaaaagtcaggaaacaacagatgctggagaggatgtggagaaataggagcactttaacactgttggtgggagtgtaaattagttcaaccatgtggaagacagtgtagcaattcctcaaggatctagaactagaaataccatttgacccagcaatcccattactgggtatatacccaaaggattacgaatcattctactataaagactcatgcacacatatgtttattgcagcactgttcacaatagcaaagacttggaaccaacccaaatgcccatcaatgatagactggataaagaaaatgtggcacatatacaccatggaatactatgcagccataaaaaaggatgagttcatgtcctttgcagggacatggatgaagctggaaaccatcactctcagcaaactaacacaggaacagaaaaccaaacagcacatgttcttactcataagtggcagttgaacagtgagaacatatggacaaagggaggggaacatcacacaccggggcctgttgggggttgtggggctagggaagggatagcattaggagaaatacctaatgttggtgatgggttgatgggtgcagcaaaacaccatggcacatgtatacctatgtaacaaaactgcacgttctgcacatgtaccccagaacttaaagtatatattaaaaaaaaagattataatggagctgaaaaattcctgccatctagagacgtggtagccatctcaaggtagtagcatgtgttactcagttgtcagtgatgatgctggtgtagacaaacctactgctcttccagtcatataaaatacaacacataaaatatggatagtatgtaattcttgttaatgatatacatgactatgttaccagtgtaggggaaagaaagatagatcagactgctactgtgtctatgtagaaagaagtagacataagaaactccattttgttctgtactaagaaaaattcttctgccttgagatgctgttaatctgtaaccctagccccaaccctgtgctcacagaaacatgtgctgtgtcgactcatgtccaaggtctaatggatttagggctgtgcaggctgtgctttgttaaaaagtgtttgcaggcagtatgcttggtaaaagtcatcaccattctccagtctcgagtacccagggacacaatgcattgcagaaggccacaaggacctctgcccaagaaagcctgggtattgtccaaagtttctccctgctgagacagcctgagatatggactcatgggaagggaaagacctgactatcccccaacacaacacccataaagagtctgtgcctaggaagattagtaaaagaggaaggcctctttgcagttaagataagaagagggcatctgtctcctgctcatccctgggaatggaatgtctcagtttaaaacccaattgtacattctatttactgagataggagaaaactgccttatggctggaggtgagacatgctggcagcaatactgctctatactacactgagatgcttgtgtaaagtcaaacataaatctggcctacgtgcacatcaaggcacagcacctttccttatttatgacacagagaactttgttcacatattttcctgctgaccctctccccaccattaccctatagtcctgccacatccccctcaccgagatggtagagatagtgatcaatgaatactgaggaaactcagagaccagtgctggcaggagtccttcgtatgctgagtgctggtcccctgggcccactgttctttctctatactttgtcagtgtgtcttatttcttttctcagtctctcatcccaccagatgagaaatacccacaggtgtggagaggctggcccccttcataaggttgttgagatttatctatgttggtgcatgcatctatgatttgttttttattattgttcagtagtattccagggtatgattacactgcaatttgcttatacattcatgtactgatggacacttggactgtttcctgttcagggtattatgcataaaggtgctaagaacattcttgtgagtctttgtgaggacatatcatttcattactgttgtataagtatctaggagtggaattcctgagtcataagattcttgcttttattttgcaattctcctaaggagtcatatagttctgtaaagcttttcactcttcacagatttgatattttaagtaacacggtatgtttctgaaatggagtttgcattttggggcattttctatagatgtatcatgaaggacacgtgaaaactctgttataaatataaacactccactgcatgcaggaatttccttctcattcttccaatggaattgtcttaatttaggttggatcagaattagaatttacgttatgatgactatgtaaataatatttataggtcagtcaggtagtatcctatgattacttttcttgcacaacttttttttttcttttttctttttttcctcatgaaggggttgccaaggctgtgtagtgcagtggctattgataggtgcgatcatagctcactgcagcctggaactcctgggctcaagcgatcttcctgccttggtctccccagtagctgggactacacgtgtgcgccatcgcgcccgggcttgcacaacttttcattctcccagagtcgccttatttattccttccagaattttaggcacttggttctccgaaagccccgacgttaagattgactccacctacagcagagggaaggcccttcttctctcttaaggaaaattcccgcctcccgcattggattccttttccggttggctggtggctgctctctttacctgcactgggcggtgaccgtgtccctcaaatgtaaatgaggttccaggggtcgctgttttttcactttccgttgacggggtgaacaatatcctcgtacctcgattgcctctccacacccttttggtcctcaaaaatcttcctcttgtcctccacatgtagctagatgcgttttcgcggtatatgactcagggtgcgattgctctttttcctctgtggagaaagcgttttcacttgtacggacacctaagtgttaagatggccgcgcccattgtgtcattcccgtcattctttgtgcaaagcggatgacttttctccccagcccgctaaggtgcacgtagccataccatgtttgtcttggctaagctcgaccctctgaaaataaatgaaacttgggcgcaggatttaggtgccaaaatatggagttcttcaccgtcccgcgctatccctgaatacttgggcagaaaaggtccactttaccttccgtacgtgcaggattcaaagatggctgcctccagtatccgtgacgagaggacgcgaacttactacctcccagtcgtccgtgctccgtacacctgcaacttcagaccttcctcggccgccgtaggccggcttggaggctgggggagggcccagaagtggaataattcaggaaagtgcaggttctgggaagtctcggtgggttccccgcaaaatcaggtctgtgtgtgggtctgtctgtcaggatgaggggaggagggtgtctgtgggcgtccgtttagtgcggagccgtggagtttgtgggggaagcgggagcaagtgggagtcggggtattggggttggggcgtctccggagtcagccctgagggatcccagtggtcggtggtcagagtctgtccagagcaacacttggaagtccgtgatcagggtttggtgcctttgcgggtcactctgtagggctcggtgattgaggactggagtgaggagtggtttttgtcaaggaaaactgtgtctgcttcggattcggggttttattttttatttttgagacagggtctcgctctgtcacacaggcttgagtgcagtggcgcaatcgtggctcactgcagcctccatctcccggggctcaggtgattttcccacctcagctttcccgagtagctgggactacaggtgagcgccaccacgctatctatctatctatctatctatctaatctgtctaatctaatctatctatctatctatctatctatctaatttatctatctaatctatctgtttattgcagagacgggggtctcactatgttgcccaggctggtctccaactcctggcctcaaacgatcctctcaccttggcctcccaaagtgctgggattacgggcgtgagccttcgctccaggctgtaatcaggatttaatatgcgactcagtgaggaggagcccgggttcatgtgaacctaggtgtgtggtccaggtttttggattaatctaagggggtgtgaccatgttagggaggtctagatgtgacagtcgtggagaagcttgtgaaggctgaagccttggcagccagggcatcctgattggtgtgtgtgttcaggtccaacggtacattccctctcagtcccttttaagtttctctgcaaggactggtttacaaatctcatttgacttctcacatctctcctttctctcatcctggtaaataggaaagctttggggaagatcaaagattaatcaaatctaaaatggtaaggtggcctggcgcggtggctcacgcctatattcccagcatttgggaggccaaagtgggcgaattgctcgagcctagaagttggagatcagcctgaacaacatagcctgtctctccaaaaaatacaaatattaactgggtgtggtaacacacgcctgtagtctcagctactcgggaggctgaggtgggacgatcacgtgaccccgggagttctaggctgcagtgaactatgattgagcactgcactccagcctgggcaacagagtgagaccctgcctcaaaaaaaaaaaaaaaagaaaagaaaaggagaaaagaaaaaggaaaaaacaaaacgaagaaaatgataaggtttctattaaagattttcgttcttcttcctcaggtttactgtgtgaatgtgtgtatacacacacgtaaatattttctttcaggttctgacacaagtaaaacatctctcttatcccaaaatgtgttccccagtaatgacttttgataagatttttgtatatttcaatttcagttttctatgcttgattttcacaatgcagataagctgctgaaacattggtataatttgccgtatttaattttacattatgaacgttcttatagtaaacatatcatccatgtttttgtttaaaaatttttttttaagatttctgtaatagtataccatcaagaggcaaaactgcaccactgtgacttgaatcactaagtgtatggatatatttagatagaattttaagacttaaaaagttcacttatcacttttaagaatgggttacaattctatgtttacccaaacatgtttctccctgaccctcatcagcaccttagtttttaatttttttgcaattgtaaatggtgtgtttttaattttgacctttctgttctcttctaatttactcttacatagaagagcaattagtttagaaaatatttacattgtttttggtcaccttactgaacaaacttccctgttctccaggttacaaaaactttcaaacatataacatgatttaaagaactttacaattgaatacctgtttgcctaccatctggattttatcatcattttattgtgtttcttttattacatatctatctatatatcatccttctactcatcattaatccacctttttttctttttatagagatggcatctcactatgttgcccaggctgatcttgaactcctgacctcaagtgatcctctctccttggcctcctaaagtgctgggattccaggtgtgagccacttcacccagccacatttatccatcttgtaaaatattgctttgttttttggtgcatttcaaagtaagttgcagacattcatacatttgcccctgaatatttcagtaggtttatcataattaagttctactgacagcttttcctaattacaggtctattagtcccatactgtataattcagtggcttttactatgtgcggccatcaccaaagtcaactttagaacattttcatcacttaaaaagaaaccctgtacccttttgttaccactccctatgccctaccactaagtaatctctaatctactttctgtctctatagatttgcttattttgacctttctgttttcttctaatttactcttatttcatttcatgtaaacgctacaatataatatgtgatcttttgtgactggtttctttcacatagcataatttttttttttttgagacagagtcttactctgtcacccaggctagaatgcagtggcgtgatctcagctcactgcaaccaccacctcccaagttcaagtgattctcctgcctcagcctcccaagtagctgagattacaggtgcctgctaccatgcatggctaatttttgtatttttggtagagacggggttttgccacgttggccaggctggtctcaaactcctgacctcagctgatccgcccacctcagcctcccaaagtgctgagattacaggcgtgagccactgcgcccagccaacatagtataatgttttcaaggtttgtctgtgtcgtagcatgtatctgtacttcattcttttttatgccagaatagtatttcatggtatggatatggcatcttgtatttatcctttcatcagttgatggacttttgggttatttcccctttttggctattataaataatatgctataaacatttgtgtgtaagtttttattgtttttatttctcttatatataagcctagaaatggagttgttgggttatatggtatgtttagccatttgagggactaccagacttttccaaagtggctgcaccatttaacatttccgccagcgatatttgagggtgtccattgccaccatgtacctaccaacacttgttatttttagttttttattacaggcattctagtgggtgttaggtggtttctcatggttttgatttgcatttctctggagacttatgttgagccatttttcatgtacttatgatatacataactgaggtacatgtatttttactaaatatggaattgttagtatttttaatagctagatagctccatttctggatgtgtgtacttctaatcagccagttaatcctgttaatagacctaaatcctttacgtcaactttgcatgcatgtgtcgctatttcctttacaaaaatttccaaggtggatttttgggttctagtaatatctcaaatggaagtattcaatgcaaagtgttatttccaaaattgtttagtcacttaatactgataaaaaagtatgtctattttggaatgcttgcaacttttagatataaaatcatcaatctgactaaaaacttattttttgtatatgttcaattgaatctataaaactgtcactcttccttagtcatataatttatttcctcttctctaatattgattatttatacttgattctttatcaaactaactgggtagcctttccagaatagttaaaatagtgataatcatcctgttcatcttcgatattgctcttgactttagagaatgtacttttatagtttcatagaacttttttttcttcattcctagaacttctgtaggatgtatttaattttttaaaatgaggtaaaattcacaagacataaaattaatcattttaaagtcaacagtgcaatcgttcttagtacagtcacagtgttgtacaaccaccacttgcagccacttcacattctcccctccagtagaccctggcaaccaactatgtgctttccgtctctttttgtagagtgcccgattctgtcgctgtttggggcgccagttgtaactgaccatgattcctggtagactgaacaaagcggggcaaacgagggaataaaagacaaaaacaaaagagtatatttggaagaaggggtcagggggcaccttgcctctagtggataagggctctgagctttacacagctctccgtatttattaggcaaaagagatagagagaagggggggtgattgtcgagtaattgtcagtcggccttttggttcacagcaggcttgtgagattgcattccttgagcaatagcctctagatgtccccatagatagcctccaggagcccagcgccagggaatggtggccctcagcaaagctggggcaggtacagaagcgagtttgcccacattctgtactcgtgataaacagtttgctgtttgatcatgtactctccagtggaatgctgagttggtcacgatccctttggccttttcggctcccaacatcttttttttttttttttttttttttgagacagagtttcactcttgttgccctggctagagtgcaatggcttgatctcagctcactgcagcctctgcctcccgggttcaagcaattctcctgcctctgctaggattacgggcatgcgccaccatgcctggctaattttgtattttttgtagagaccgggtttctccatgttggtcgggctagtctcgaactcccgatctcaggtgatctgcccgcctcggcctcccaaagtcctgggattacaggcgtgagccaccgcaccaggccagtgtgctgtctgtatgcatttacctaatctgggtattttatataaatgaaatcatataacgtgacatttagtgtctgacattttctttttttttttgagacagggtctcactctattgcccaggctggagcgcattggcacactcttggctcactgcaaactctgcctcctgggctcaagcaattctcatacctcagccaccctaacagctgggattataggcatgcaccaccatgcctggctaatttttgaactttttgtagagatggggtttcctcatgttgccctggctggtcaagagtttatcttgagctcaaagcaatcctcctgccttggcctcccaaagtgctaggattacaggtgtgagccaccacgcctgagtgtctgacattttcacttagcataatgtttttgtggttgtggattgtgtgctgggctactcctttaatgattagccagggaatctataaacctgccttaccgttcacttcctgcttgcactgaacctgtagacatcagccagaaggaacgttttagagtcttcttaggtcttttctcagccaacatcctcccctgtgcatgcgtgtggcttttatatattcctcagtctatacgagtgcttttgaatggtataatttcctcaagacactttcctcctacctttttctcacaacctttcctctgtgactcaagtgtaatcttttgccccaggcagctgaaggttgttgttctgcttcacaaagtgtttgagaaatgcccattacttttcctccctgagtgaattccaaaacaggaaggggcctgttgcataggtccttcaggtagttagaatagacaacaaacaatttttttatttttatttttgagacagggtctcactctgtcacctaggctggagtacagtgacgagatcatggctcaccacagactcaaactcctgggctcaagtgatcctcccacctcagcctcccaaagtgctggtattacaggcatgagccactgcactcagctaaacaaaattatttgtgaataaagtctattctgttccctccagggcctgaatccaggttcccacgttgggaatgttggccacaatctttaagaccatcactgagctggggagggggtggagcaaagacagataaaaatggcacagaactttcctactatttttaagtcaccattttgttgttgttgttcttgtttgttttgtttctttgagatggagtctagctctgtcacccagactggagtgcagtggtgtgatctcagctcactgcaacctccacctgccaggttcaaatgattctcctgcctcagcctcttgagtagctgggactacagacatgtgccaccacacctggctactttttgtagttttagtagagatggggtttcaccatgttggcctggctggtcttgaacttctggcctcaagtgatcctctggcctcagcctcccaaagtgctgggattataggcaagcatgagccaccatgcccggccagtcaccttttttttgactcaatatttgttctgttgttgtaaacctttgactatttttcagagttctgaccaagtttttgttttttgattgtttttacttgattttttgatagtttttttacttgagtttttgatttttcgatagagggacggacccttggacctacctactctgccatttttactcaatgagattttcctccacagtatatatgcttttgttttttttgttgttggtacttttaaaaaagaaataaactgatgcaagtgcaccttcagtgatatcctctaatccaccccctttcctctcctccatccctagggataactattcccttgaactaatttcatataatgcatgttttattaaatgtgtacatattgaaaaataatacatagtcttattttatgttttttaattttttaaatatacttttctttgttgtttctttcatatgatgatgatttgtgaacacgtcctgtttggtagtgatgctttagaatttatggaaattttctttatggcttcctatacatacatgagttttcaggaaatatactcctccagggaaaggacttagccactggagcaaacaggcgtgattacattctccagaaagctcataagggtcaaaaatgaagtagaagctcttcagctattcctgggaaaggggctgtggaagctcatgggaaaggaagccttgctgtttgaaatacacaccctggatgtcactgaaatgttgcatccaccacctcctgcccaggaatgttagatcatttgggttctgcacctttccactagtggcgttctaagaagaaaagtgtgaaacatctcttgccacaattacgtgcttctgagattgcagagggaaggggagcatttgcagctgtgggttaaaggatgagtcagtgcagaccctgtgggtttggagcatgcaggagggccaccgggagcttgtcacaatgattccacccaggtggaaggaaagcttagggtgactccatccagttgatgctctcaccatgtgagcctcttacttgagttttagaattgggcataaaaaaagcctctggggccgccactctctgacctgctgctttcaggccaagggtgtagcgtgcagtttttccatttgtctttgtgcctgtgtcactgttggcagtgctgatttcagaaggtcagattatatgtctatgacagtggccatcttccatgatgaatgaaactccctcaaggtagtagcaaagagagctaagatgtatgatgatggtatgcagtccaaaggtattcagcagaggctaaggtcatgttcttggagacaggctgtgtgggttcagattctacttctgcttttggacaatatagtcaaatctgtaagccttaggtcaatgttggaatgggaaataatgattgatactttataaggatgtaacgcagaaggtagtaatgagaattcaaatacaacaacccctctgcttggcttaatacatttgtcttcaaactgaggcatgcctacatgtgaggtgtatgatgacttttgaccaggcatgtggacacacgtggttttaaagaaataaatatccaattcctcaccttctctgtcctttttctaaaacctgatctaagaagtttcttggtgttgcagcatcatgttggtgctggttctcctttcccatctcccctctcacagtcacctcacttacatttcacagaagaaagacagtttgtaaatgtattggccatacctgtagaatcttatgttttgttgctccaggatttgttgttgccccagggtgggttaaaacttctggggccccaaataaagggacagttagagatggccttgcattaaggtgagaacacagcagcagtgacagcacctgggcctgcagggaatgtacactcaaatcaatttactcttcagcccacaggtcctgacttcaggagcaagacacttcaagtgaggtgaggaggaggttccaggacctggataccatcctttgcagggatgtaattcaccagagaccaagatttctagccagaaattgagggcagctcaaggagagactacagacacagcatcctacttactggctatttcccagtaacaaaagaaaatgatcaagtcccaggtgactttttgtttgttttagtctttccttcatcacatgattgatttctggaagactttaaaagtcagttgaattaagtcaaaaagtataatttggtaaactaggatttgtgcatcagtaaatttagattgtaatttcaacatctaggcaaagtaggatcaggactatattgtttacatgtggtatcatagaaagatacttggtctttgtctggcatagagctcctaaaacccttggaatttcctgaatgataagggtcttttttttgtttgagacagggtctcactttgtcacccaggctggagtgcagtggtgcaatcttggctcactgcaacctcggcctcctgggctcaagcgatcatcccatctcagcctcctaactagctgggagtgtgtgccaccaggcccagctaactttttgtatttttttgtagagatggggtttcaccatgttgcacaggctggtctctaactcctgagctgaagcaatctgtctcccttggcctcccaaagttctgggactacagttgtgagccactatgcctggtcctctttttttgtagtgaaactactctcagtggacccctaggtagcttcagtatggaggctggttgccagaaataacaagccttgattagaagcttggaactttcagtactacctctaatctccagggagcagagagaggctggagattgagttcagtcaccagtggccaatgatttattcaaccatgcctgtgtaacataaaaacccctaaacagcagggtttggagagctgggttggtaaacacattgaggtgctgggaggttggtgtgtgcagagagagcatggaaatttatgcccatacaccaccatactgtgccctgtgcagcttttccattgggttattcctgggttgtaaataaaccagtaatagtaaagtgctttcctgagctctgtgagttgttctagtagattattgaacctcaaggtgggttgcagaaatccccacatttgtagccaagggacaaaagtctttgtaacctggggacctcacacttgtgactggtgtctgaagtgaggttggtcttgtgggattgaaaccttaacctatgggtcttccaggagttggtgtcagaattgaatctaatcgttggacacctattgggtgttagagaattggagaattggttgatgtgagcaaaaacccacacatttggtgtcagaaatgtgagtaaaaacagcacaatggaattcacacaaaatgactaatgttggaacctaatgtgtgaccggagcatcctgtgggttatagtagctgtcaccttctgtctaatgtctctgactgtcatcacatccagagagtccttggtcacaggatatgcactgactctcaggagaaagcagaccagttcccgagaggtgtcactattaaatgcacttaggtcccaggacagtttttagatggttcttcctagaggtggtgtgacagatgatgtcttttttcttttttttttttttttttttttgagatagagtctcactctgtcatccagattggagtgcagtagtgccatcttggcctaccacaacctctgcctcccaggctgaagtgattctcctgcctcagcctcccgagtagctgagattacaggcatgcactacgactgcccggctaatttttgtatttttagtagagacagggtttcaccatgttggccaggctggtcttgaactcctgacctcaaatgatcctcccacctcggcctcccaaagtgttgagattacaggcatgagccaccacgcctggccccgaatataaatgccataagcccagccttctcatacatgccaaagcacaggtcctcagagacctttttgggaagaggccaaaggaactcagaggacacagttcaggggtccaaggcaaggttacccaaggacccagtcttatggctggtagggtcatccaggaataaaacctgaaaggctgaggaaaatggaaagattgcacaactttctttttttattctttttctaaatttttttttcatttttcttctttttcttttcttttgagtttcacattgtcacccaggctggagtgcagtggtgtgaacatggctcactgcaacctcgatttcctgggctcaagagatccttctgcttcagcccctcaagtagctaggcatgtgccaccacatccagctgatggttgtattttttgtagagatggggttttgccatgttgcccaggctgggattgcatgactttctaaggttctctgtatgaacaggtggctgacttactgtttgagacaggattggcagtagggagttgaaagtactgttgtctggtaagggaatgggttgttgggatccagagggtttgctttacaacatccccctgtgtaagattgtgcacattctttttccatgttcaaagccagttcttacaccctcatcctttaatacgttaaaaaaagtaagtatataaatgtacatggatatatatatatatatatatatatatgtgcaatatgctgtataggtttatagtctgggagcaataggctataccgtagagcctgggcatgtagtaggctgtatcatctaggtttaagtaagtgcactctgtgatggatgaacaacagaattgcctaatgatgcatttctcagaatgtatccttgttattaaatgacacatgaataaataaatatacatgtatacatgtttgcatatatttgtatgtatgtatatatatgtatatatatttacagacgtatctgccttagcccttagatctttggatagtacctttccattattgtattttctctttcacaaactaaattggtacatgctagaccttacctatcctctgtatttattaatctggtcttttatatattgcatcattctgtccttttgttgcatttttggtagttttttcagatctacttaccagttcattgactatctcttcagttatgctgcttacacgcctgataacataaatataaatacttcaaaacccatatgtgtgtgtatggtttttgaataatattttgtattttcttttttattatttatttatttattttatttttatttatgtatttattttgagatgaagtctcgctctgtcactcaggctggagtacagtagcatgatcttggctcactgcaacctttgcctcctgggttcaagtgattctcctgcctcagtctcccgagtagctgggattacaggcatgcaccaccatgcctggctaatttttgtatttttagtaaagatagggatttcaccatgttgggcaagctggtctcaaactcctgacctcaggtgatccgcccgcctaggcctcccaaagtgctgggattacaggtgtgagccaccatgcctggcctatttatttattttgtaagccagtcacatttagcagtagggggtaataatacttaattgtctcttgttctttggacatgttttggaaagagtcttttactcctcctaacatataaaatatacttatttattatgtagtatcttgtagtgtttggggtttcttcctggttgattctggtagcgcacatgaagattcattgaagattcatgatgaataaagaagtatgctttattcatcctgatattgctaaaatatatttagtgcctggcaaataggtgctcaaaaaaaaaaagaggattagcaagaggattaaatgattggttcttatagaaacttctgatttgttaaatgatagataattacacaattacagaatattttgctagagatagattttgaatatagatagattttggagatggatttttgcctctatgacaatgtatttttttaaaaatcacagcacctagatatatagatgcagactatttggtaaaaatgagcagaacaatgttcttcacatttcttccatataaatgagagaaatacttcatattaagcaggactctcttattacaggaatcactgaccctggaggatgtggctgtggagttcacttgggaggagtggcagctcctcggccctgctcagaaggacctgtaccgagacgtgatgttggagaactatagcaacctcgtgtcagtgggtgaggacagctgccctgtgtcactcagagagtacccagtcaaaggcctttgctttctcagctttcaaaagctctggagggcctgtggtgctctgaagtggtagattctgtaccctctctggccccagataaaagagtgtaatgtgccccctttagagggaaaatccctttgctttgcagacacataaattacatagttcctaaaacagaacatggtcccatgttgatagaccacagctcaattcaatgagcctaagttgtgtatcatttcctatgaacagggtatcaagccagcaaaccagatgcactcttcaagttggaacaaggagagccatggacagtagaaaatgaaatccacagccaaatctgtccaggtgagttcagggtgagagccagcaaggagggtggctgagcaagtcacatgatagttgttcagcagtgtctgagctgtcagggcatctgaggctgtgtggacagagcctccatgtatccctctccccacacaaaagctctttctccttcgggtatttagaggaacatctgcttcgttatcgcgtcttggatttcatcactgtttattttttatttattttattttatttatttattttttgagatggagtctcactctgtcacccaggctagagcccagtggtgcaatcttggctcactgcatcctctacctcccagttcaagcgattctcctgcctctgtcttcccagtagctgggatcacaggcacccgccactacgcccagctaatttttttgtattttcagtggagacggggtttcaccaagttgaccaagatggtctcaaactcctgacctctggtgatccacctgctttggcctcccaaagtgctgggattacaggtgtgagccaccacacccggcctcatcactctttatttaatctaggtttgatttgtttttctcaaggtttcttcctttttaggattctcaaatctcatcatttcttgttcccccatcagagcatcactacctgttccttctacttctcttgctatgaaattcctccttccatgtctgtctccaaagagtggtcttggatatcagcactctctcctgaccactatacctttctgcccctttagataatgttgattttttttttccaaaggtcttcccaccctatcttggactctgtgcccccttagtaacctggtctgttgctttgcatatatttgcttccttagcttctcttttttctcccactctgaggtcctccagaggttctgtttcccatttattttgctctgttctcatatcctttaaaagtttccttcattctaatgacttaagttcttgttctctatggagattctcagattgacatctcccttaatatttcctaacttacatgtttgtacctattttttacccacttgcatgtcaactccttgagtcgatcctggccaccacagggttaccttgaaacttccctgcctcctcagctaccgtatttaaagtctttgctctttcaattgatttttgaagtagtctcattctctttccaacccaaaccagattactacacctcatgcctgctttgcttcaatttccttttggaatcattaattctgcctattatttagtttctcttaaattatattgctggacttattcccttaaagcttttctgttcttaccatagtctgatggcactgagtcccagtgaatcatagcagtcatataagatggaaatttctcatctgtcaggtgatattctagttgaatcaccatgatatggtatcatcttgcctacacagagtttgttttccttttccttttcataaattcaaagccaactatatataaagcactacatttgaagtagtttccgcagtgtgtcccttactttccttgtttcattgccttaaatattttttgatagactattacatatgggccctgacagctgtgaacatcaataacaacaacaaaattcttcttggagattacctgctaaaaggaagaggcacaaaattaatcaaaatggataaatgtcttgtggtgaaaaatgctgggaagaccaataacaaagtataatgagggatgccgggagtgggaatggctgtttggtcagatgcctttgagcagctgtatgacagacatgaatacgtccccctggtgaattaccttccaagtagacaaaatagcaggtccaaaggcccaaggcaggtgtgtgtttgaggaacttcaaggaagcctgtgtgaatacagaggagtgaacaagaggggcagtggtcggagataatacggaagtaaggacagtgtggtgggatctggagtttggggtagacaggtcatgtatgacctttcaaggacattttaatgacttgatttttttttttttttttggcacagagtctctctctgtctccaggctggagtgcagtgctgtgatctcagctcactgcaacctctgcctccctggttcaagcgattctcctgcttcagcctcccaagtcgctgggactacaggcgtaagccaccgctcctggctactttttgtatttttagtagagacagagtttcaccatgttggccaggatggtcttgatctcctgacctcatgatccacgtgcctcggcctcccaaagtgctgggattacaggcgtgagccactgcatccggccatgacttgattttttaaaaaattatgagatgaggaaacatgagggagttttgagtagaagagtgacatgatgtcatttatatttaaaaggatcactttgactactttgtagaaagtatacaggagaaggcagaggttgaagcctgaagtccacttgggaggctattgctatagtaccagaaagagtgattctcttccatctaggtagaaggggtgagtgttagtgagtttcagaatacaggagtcccctgttatccacagtttctctttctacagtttcagctacctgtggtcaactatggtctgaaaatgttaaatgggaaattctagaaataaacaattcttaattacattgctcaccattccaaggagcatgaaatcttgcaccatcttgctccatcctggaacaggaatcattttttgtccagcatatgcatgctgtgtaccctacccacctgtgtcacttagtagccatcttggttatcagatcaactgtcaaggtatcacagtgcttgtgttcaagtaacctttgttttacttaataatgcttccaaagctcaagagtgtgatgctggcctattgttataattcttctattttattatttgttattgttaatctcttgctgtgcctagtttgtaaactttattataggtatgtatgcactgtacaggaaaaaacataatggatatagggttaagtatgattcagagtttcaggcatccatggtgtggggggtgtcttggaacatatcgcccatagatgagggattactgtatatttataaaagacataaggaatttactactgaagtagacaaagggtgtgagacaaacatacaaatgaaagatgatagtaaggtttctggcatgagtccgagcaggaattaacttgccatttcctgagaaatttaccttgtttatacactgactgcttttattttttgttttctttgtttaaattataatggtttattcttgtccaagtgacaataggcatatctacttggagttttttaaacagtggaaatagtgtggtcagtagagccagcctgtacaagactgtttgtgaaatagttctattccatgctcatggaaagatttattgttctcttctttcctagaaatcaagaaagttgacaatcatctacagatgcactcacaaaagcaaagatgtctgaagagagtggaacaatgccataaacataatgcatttggaaacatcattcatcagaggaaaagtgattttcctttaaggcaaaatcatgatacatttgacttacatgggaaaatactgaaatcaaatttaagtttagtcaaccagaacaaaaggtatgaaatcaagaattctgtgggggttaatggagatgggaaatccttccttcatgccaagcatgaacaatttcataatgaaatgaacttccccgaaggtggaaattctgtgaatacaaattcacaattcattaagcatcagcgaactcaaaacatagataaaccccatgtatgcactgagtgtgggaaggctttcctcaagaagtctcgcctcatctatcatcagagagttcacactggggagaaacctcatggatgcagtatatgtgggaaagccttctccagaaagtccgggctcactgaacaccagagaaaccacacaggagagaaaccctatgaatgcactgaatgtgacaaagcattccgctggaaatcacagctcaatgcacaccagaaaattcatacaggagagaagtcatatatatgcagtgattgtggaaaaggcttcatcaagaagtctcggctcattaatcatcagagagttcatacaggagagaaaccacatggatgcagcctgtgtgggaaggccttctccaaaaggtccaggctcactgaacaccagagaactcatacaggagagaaaccctatgaatgcactgaatgtgacaaagcattccgctggaaatcacagctcaatgcacatcagaaagctcacacaggagagaagtcatatatatgccgtgattgtggaaaaggcttcattcagaagggaaatctcattgtacatcagcgaattcatactggagaaaaaccctatatatgcaatgaatgtggaaaaggcttcatccaaaagggcaacctccttattcatcgacgtactcacactggagagaaaccctatgtatgcaatgaatgtgggaaaggcttcagccagaagacatgtttaatatcccatcagagatttcacacaggaaagacaccctttgtatgtactgagtgtggaaaatcctgctcacacaagtcaggtctcattaaccaccagagaattcacacaggagagaaaccctatacatgcagtgactgtgggaaagctttcagagataaatcatgtctcaacagacatcggagaactcatacaggggagagaccgtatggatgctctgattgtgggaaagctttctcccacttgtcatgccttgtttatcataagggaatgctgcatgcaagagagaaatgtgtaggttcagtcaaattggaaaatccttgctcagagagtcatagcttatcacatacacgtgatctcatacaggataaagactctgttaacatggtgactctgcagatgccttctgtggcagctcagacctcattaactaacagtgcgttccaagcagagagcaaagtagccattgtgagccagcctgttgccagaagttcagtctcagcagatagtagaatttgcacagaataaaaaccatatgaatgcagtgaatgtggtagtgctttcagtgatcaattacatcatatgtcacaaaaaacacagaggaacaaactgatatattcaaggtggaaagcccttgaataaaaccttatggctaataagcatatactcagagaaaaatagtatgaagtggagactgggaaattcttttatgggaagatagatcttctcatcagtgaccatagatcacatcttcagtgagcttatagttggtagaaatataatgatcatggaaaagtccttgttcagaaacagtacgccagtaggtatcagggggtttacacaggagagaaacttttggaagacctttgaaggctatgaatgtggcagggttgctagtggtacattctgccttatcctcagagggaatcatatagaaataaaactatgaaaatgtaactagaacatcttcatcaaaatatgaaagaacacacgaagcaaataagccctgtgaaaaggagtattttagagatttcgatcagaaatctaacatcattatatggcagataatatacaggatgtgtattttaggacaatataccttgaatcactagttgatatgtcaatgactaattaaaaggggttgtcagtgttacacatcattggttaaatttatagcacaatgtacctcttcccccttttttgataagagtcttctattcccaaccaagatcattatatgattagctcttgtgtttctttgattccaaatttcttcacttgttatttcagactactgaagctcttcaaaaggaaaaatgtatttaatttaataatgtaacacaacaagtttggatgtgtttaactttataaataatcaccccagaggaatgaagttcaaaacttgtgaataaccaattggccatgctcttaatttagaaggtagtcctcatcctaaccctgtggtttgtcttattgttggcataagcaccattcagaatagtttgaatgatctattttctttacctgaaactatttcctttatctaggaaccgtggatgatggcagtgggaaacaaagcaaaattgcaagccagcatttttaaaaagctggattatatgcatgtagctattttaccctccagcagctgtagttaaaaaatgcatatgcctatatcagttgaaagagacatacaatataagatcaaattgtcctgataatttcttattcaagggacatatttggagtgggaaggggaaaggactcaattttccttacataaaacaggatatgaatacttttctaaaaagtgttcatgtcttctctctacctaaattataaattccttgatagtttgtaggcaattgtatataccctagcagataccaaaatagaaattaattatatgtagatttggaagatgaatgaaggtgcatgaataacccagtggacaattatcaaaattacttttgccattgaaggaaaggaactactggcaagaacttctaaggattagtattattctaaaaaaaactttaaaaaaatctgaatagagactcatttctgtcataagaggggcagaagagagaaggaataggattcacagaataagcccaataaaagaacaaaataacttcattctctaaaaataaaggacagcatgtaagatgggtaaaggtgagatccttttggatatcttggataagaacccttaaatttatctacagacctgtcaccttggagagctgctactgttttaaagatcctggctcctctgtggtatgctgaattggaacataagatttctcttcatcattccttctcacttggggttaagacccttgtcctctcctatactcagagttccttcccttgatctaataaagatacatccatgttagaaacagtcctgctcacaaggaaaaataaagtggaaatttgccataaagtggctgcctcacagtggaaacccgaagtctgggttatcgggtgattacaacaaatagtttttgagcatctgcactgtggtagacacttgtacacacaggatacactgaagaacaaacataaagtagtggcctgtaacaggatggattcagtacagatgctctacagttaagagtataagaaatgaactcttcttcaacctggacttcagattctctctacttcttgccttgtgaatctgcacatcctatcatagcagtcgtagcatcttactccctgaacacataaatcagggtgcgctactgggcttcccaggcctgtccttgggaccaggtgttgaaatcacctttcagaagttggcatcccagctaaataaatttaactggatactcagttccaggttgcctctttcaaaaggcacatcaccccatgccttcataaaaatggtagccgacatttattaagcatgcggtttgccaaatggtaactgcattatttagtaatttaaaaaaattaaagtttgtttttgtttttgttgtgtttgagacagggtcgtgctctgtcgcccaggctggagtgcagtggcctgatcatggcttactgaagtctggacctcctgggctaaagccatcctcccacctcagcctccagagtggccgggactacaggtgcatgccaccacactctgctaatttttgtatttttgtattttttctgtaaaggcagtgtttcactatatttcccaggctggtctccaactcctgggcataagtgatcctcctgacttagcctcccaaattgctgagattacatgtttgagccatggcacccggcctctttagttatttaacactcttatatgctccatttccatcttcaagtgtttcagggaaatatttgattaaatttgaggcctcattcctttttccttattacaggtaaccacacactgtatgcagttgcacgtgggcattggtcctcatagagatcgctcccgtatttggcctcaagacaattctcggctagactagccttgcccattcttttctgcatccgttgaaggagattcagaacatccacaaatttggtccactctgtgaccgctgtccccctattccccttcagccacttcgcctttggcacaccttgttggtcctgaagaggccctcagaaatactccacattccgccctaaactcccaacagattgtattttctactgaatggaaactgacacctcctaagatgaactgcagccacgatgcttcttcctaacggctcaatatggggtacagcgcgcggccatcttatttttttgctcaggctgttaaaagtttttataattttctgacaatttatccagtttgcgcagtgactgaggtgccctgaaattaattcactgtcttccaacgccgtggtaacagcccttccgggttctctggtgggagtcgccgagatgggcgtggccatgatacgtcacaatacgaggccgagggaggaattctgtcgtctgggaacggctggtttcgcggtcagacgccgagggccctcgaagtccctagcaacggctgcggagggagatgtaagtcgttttggacgcaggctcagtgtttggtcccagcgttcggtggagtccggagagactcaggatcagatgagtcggggtctggatgtggctccaagtgaaaggcctgtgggggtcagtgaaggggagccccctgttctgagaccgtgtgggaccccgcgtcctggggttctttctgggtttactcaatggagaagcctggctttggtgatagggcgcctggcggtcagtaattaagagactggaagatattaacgaccgactgtcaaggtttatggtcgttgagggaatgccgtgggaatcagtggttgagaaacggggtaggaaagtgtgtatcagtgaatgaacttggtgtccattccgggtttgcaatttaatgtgatagagaagcttggggctggagaatgttttagtgaaagaggttttagtttgcggtttcagatttaatttggagtcaatgtttgaggaggcctgtacatgtctgtggtttaggggcctgaagaggctggagctttggaggcccaagggccctggagagtggatgggttgaggcttaataattgactgctggttacagttgtgattaaactacatttacctagtggatctacatgcagttcagttcttcaagtccaagtccgtcttaaaaataacaatgaaaaacatttcccttcctatattcatatcattgtctacaaatttctggacgaggaaattacgagtttgctactaaagtcgagcttttttcctctctagttcccaactttaccatgtcgttttcataaatattttctttcagatttattccaacacaagaaaataatctctgttacccacacttctgatttttatttaggagcattttttttttcgtttcatcctcacagttttcacaattgcaatactttgggtaaatatttgatttcatcacttaaattctcatcacaaacatacatacatgtatgtatatatagtatatatatctatatttctgtctctatatacatctgtctatgtatgtatgtatgtatctatctatctatctatctatctatctatctatctatctatctatctatctttctatacagagagagtcagtcttgccctgtctcccaggctggagtacaatggtgccatcagctcactctaaccttgaactcctgggtttaagggatcctcctgcctcagcctcccaagtagctggactacatataaaatttttcaatggcagtatcacatcagaaggttgtaccagtggcttagtaaatggagtcacattaaatgtttgccttaattaggatggaattgacatgtataaaatattcaattctatttctatattttctatctatatataacattctgatactccaattactcaagttcttctgttcccaccccaagatttgtgattcacttttttatgtcctagatcttatggttacatttattcttaagtggcttatactgttttttttgataattcctctagaagaggaagtcattttttaaaaattgagacagagtctcacaccgttgcccaggctagagtgcagtagtatgatcttggctcactgcaacctccgcctcccagactcaagggattctcccacttcagtagctgggactacaggcactcgccaccatgcccagctaatttttgtattttttgtagaaatgaggtttcaccatgttgcccaggctggtcttgaactcctgagcccaagtgatccacctgatgcattacctgcctcggactccaaagtgctaggattacaggcgtgagcgactgctcctagccaagcgtttcttaaatccaaatatttgctggagtatgcgtacctaatgcatgtatgaaggcctatccctctgagagtctgggttgatagatttggagtacaatccctgcagagtgttgataaaattctctatggaatgctgttgtgacatacttggtaactcacagccctaatatatgctaaaatggatggaattttgtgagaaacaagaaaatatcttctagtagtgatgattttttgtaacaaatatatgaaatatctgtatgtaatacaggatttaaacacaaggtattgttagaattctaggttgtgtgaagttacatgtcaagatgttactgaaatgccaagggttcagtctaggtcccgttgcttgccacacagaaagacaatcactgagacaatgagtattgcgagagaagaaaggcttttttgggtaacatcaggtgggagaggaaaataaatatcaaatctgtctccccacaaccgactaaaattggtggcttatataacaggcaaggaatataaaacaggaattagggaagggtaaggaagaggagttggccaacaggaatcaggtggtcggttaggcaatcatgatggatgaggggtccaccatcgcattgtctagatgcagtgatctggtaagtttcagttccttgaactatctgggaggcctgaatggtttcatgagaaacgaactcagataaaatgaatataagtttcaagctttaagactaggagagtcaatttctatatttattcaaaaagactgttaacatcatttctgtggggaaatccagccagtttaaaaaatgatcagcaaagatagggaatatggtagaaatgtaaaggaaatagaggttaaagtgatatatagagcatagggaatgatggcatgatatgtaaaaggcatgtctaaattttgaataaacataatgaagggcagagaatgaagggattaaatggaaaatttgtcaggccatgagggagaatgccaaaagatttggtccgaagccaaccatatgaaagccaatgttagaaggtgtctgtaggggaagtagtagaatagaaatgtggataagtggggtaatcatagcaacattaacttttattgccaggccgagtggattttgtgttagtaattgaggtagcatggtagagggtaggtttcttttgtatttttctagcctatgggtagtcttatctttcacccagtgacagcaatgatgcaataataaggaacagccagagtttcatatataaataaatatataaattatatatatatatcttttgagatggaatcttgctctttcacccaggctagagtgcaatggtgtgatctcagctcactgcaacctccacctcctgggttcaagcaattctcccaccccagcctccctagtagctgggattacaggcgcccaccaccatgcccagctaattttttgtatttttagtagagatggggcttcaccatgttggccaggttggtctcgaactccagacctcaggtgatccacccgcctcagcctcctaaagtgctgggattacaggcgtgaaccaccaccttacattctggctggggaaaacaaaataaaaacacaaggaaactaaaaaatgaggtagctgcaaattatgagagaaaacacacactgcctatatccaatcagggaaataagcagacacacttgttttaaacaaatatcttgggagaggcaagtcagaatgtcagatttcgacttcaacgtatctgtgacactcttagatggtcatcctgtttttaaaatgcatcccttagggaggtgggggggtcagccccccgcccggccagccgccccgtccgggagatgaggggcgcctctgcccagccgcccctactgggaagtgaggagcccctctgcccggccagccgccccatccgggagggaggtgggggggtcagccccccgcccggccagccgccccgtccgggagggaggtgggggggtcagccccccgcccggccagccgccccgtccgggaggtgaggggcgcctctgcctggccgcccctactgggaagtgaggagcccctctgcccggccaccaccccgtctgggaggtgtacctaacagctcattgagaacgggccatgatgacaatggcggttttgtggaatagaaaggggggaaaggtggggaaaagattgagaaatcggatggttgcggtgtctgtgtagaaagaggtagacatgggagacttttcattttgctctgtactaagaaaaattcttatcctgttgatctgtgaccttacccccaaccctgtgctctctgaaacatgtgctgtgtccactcagggttaaatggattaagggcggtgcaagatgtgctttgttgaacagatgcttgaaggcagcatgctcgttaagagtcatcaccactccctaatctcaagtacccagggacacaaacactgcagaaggccgcagggtcctctgcctaggaaaaccagagacctttgttcacttgtttatctgctgaccttccctccactattgtcctatgaccctgccaaatccccctctgcgagaaacacccaagaatgaacaataaaaaaaaataaaaataaaaataaaatgcatcccttttcttcattctgtatcatcaaactaattttcccaaagcaccaatctcacatttagagagaaacttattctcagtgtccaacctttagcctcactgtgggcacattctcctgtgcttctaaagaaagagggaaagatgagaaacaatgatcatttggaaagtttgcaacaggccaatgaaccatgtagacctctccagaagcagatgtgcttctgaataggataagatgtgttactgaatgggtgctactgctggtgcccacatgtgttgtctgtcaccttcagtcacatttggcatgtagtacctacacagatgtcagatctgaatttttcccatttcattgtccctaatacactgatcccttgtcatgtaactaatagcatcttctataattctacaattatgtcttggttggcatcacaaaaggggcctaagggaccaccttattccttttaaaccaagactcatgccacctttacatatttcttagaaaggaggatatataatggaggaagacaaggctcaccgatgagttcaaaacaaggggacgaagaaagtgaggaattaaggtttgctcctaagtattttgcttgagtcaagagactttttttttgaaagatatatttaacattttacattatgtatataatagtcaaaaagtcttttatctcagtcaatgaatattttatttcagtgaaagggtcttatatatcggggacatctggcctgggatctaggaaacatggaaggaaattaatctgtaataaagtgttagtaattaagaggtcaagctctatgactcagtctccaaagtcaactttcctcaagtcctaataacttttagacgcccccaatatacagactattttcttttaggctcaactttctttacataagacatgtgaatccacacgtctatgccttctacattttagtgcaaggattagtaaaaagtaactaatagagcgctttccagtttggttaaagggagtcctttaaccaaatatcattttagatatcatttccagtagaaaaaaatctcctggctgaagttcatgggttttaagttctttgtttcctgggagttcactataaaaagagtcttttttcaaattatgatttttaggtagttgttttataaagatgtcagaaaaatttaatatgtcttcttttagcattatggatttatactttcctggggatagtttcatgcatctacctgttattatctcaattagggaaaactgatgtctaccaaaaggggtggattttaggttaaggaaaaccagtggaagggcccttggccaagacatgtgaaaagcctgggttaattttgccaattgaattttaattattttgtttatgcattctactaatgcagatgactgagggggatatgcagaatggaagtgttaaagaattggccatattttacgtagtgactgaattacatgggcagtgaaatgagtacctctgcccctatgaagttctagagagactcctcaagtctaaataatttttcaaggagaattttacttaatgttagggctgttgctcttctgcatggaaatgcttctacccaatgaaactatacagactttcattactagaacatacttgtatccttgtgatggggtagtcgaataaaatctgccacacctcaaagggggcctcaggtaaagaaaaatgttcttaggaactatgtaaaggtttccctggattatattttgggcaaatatggcagcaactaaatgctttatgagctatagttgaagaaacttttcaaaatactatttttctcaataaccactttatcagggctccggtgaattaaatcagtccgtagggttgaaaatgatgattgtaattcagtaggaagtataggcaagttgtttagtccacaccatatttcacctttttgttttatattttctaattctgtttttagagctctggattgggttaatttatgtcaaatttgggggcttctttcaaagttaatatgaattgtttttattgcctagatgtatttaggcagtcctcattgtaaccttatgagctagctgacttccttcactttctggagtatctgatttggaattttttggagtatctgatttggattttaataataggtagtgagttttataataatgtttttttaataataaagagataaggtatccattttttatggactggccggaagaggttcaagaccctctttatttattttcacagtattacaaagtcacgaatgacttcaaaggtatatctgttgcctgtatataaattagcagttgttcattttgccaactgacaagctctaattagtgctgtcaatttggcttgttcagcagagattgcttctagaagataagcactttctattttttcccttgggatattataacataacctgcttgtaaatttgagattaatctttaagtaagatctgtctgtaaatcaaaccacaccagtgttactaagatgagtttcttgcaggtttgtcctaggagagaaaagctgaccagttaaggttatgcaatcatgaggcatttcatccaaatttagggggagaagagtagcagaatttaggttattacatgtagacattgtcatatgaggtccagaaagaagtaagacttctaaagggactagcttgctaactaagtaattctgagcatgaagtgaatttagaagtgcttccaggctggcatgctggctcatgcctgtaattctagcactttgggaggccaaggtgggtagattccttgaactcagaagttcaagaccagcctgggcaacatggtgaaaccccatctctacttaaaatacaaaaattagtcaggggtggtggcaggcacctatagtccctgctactcagaggctgaggtgggaggatggcttgagcccaggaggcggaggttgcagtgagccaaaatcacaccactgcagtccagcctgggcaatagagccagaccctgtctcaaaaaaaaaaaaaaaaaaaaaaaagattatgcaatcacgaggcatttcattcaaatttaggggcagtttcatatgaggtgaagaaagaagtaggacttctaaagggaccagcctgctaactaaatatttctgagtatggagtgaatttagaagtgcttccaggctgggtgtggttgcttatgcctataatcctagcacattgcgaggctgaggcaagaggctctcttgagctcgggaatttgagaccagcctgggaaacataaggagacacccctgcctccagaaaaaaaatttaaaacttagccaggcatgttggcatgcacctgaagtcccacctaggtaggaggctgaggtgggaagattgcttgagcccaggaggtttaccagtagggtgattgctgtattaaccccatgcaggctggtagtcctctagccactgaatccaactgctgactgttgtattatataggtctcttttgagccccatgtttttgggtcataatgcctagggtattttcttgatcttcctgtacaaacaacgtaaacaaaataatttggatttcctagtactggggcatctataagatcctttaaattgttcctaacattaattgatttttctctgtccaatccagagagtctgcttgtctcattttaaaagggtatagaaaggtaagcttttaatgaaaaattcagaatctaatttctgcaataattttccagttccagaaatcctcttaggtgttttcttagtttttagggtaagcaaggaaaatatttgttttattctatttgcatcaataaaaaggcttttcttggacaatagataactctaaatattttactcattgtagacagaactcaagattttttattggagaccccatgtctctttgaaagcaatttttgtaacaagtgaatcccatctttttgtagcagctttctcatcttctgaacaaagaaggaaatcatccacatattgtattaaagtatagttttcaaaaatgcagcatataagacatttggtttcaatatttctgagaaataagttggactctgagtatattcctgaggcacaatcatccatgtccattgtttgtctttccatgtgaagccagtagtgtgggggaaagcaagagagatcagactattactatatctatgtagaaagaaaaagacgtaacaaactccattttattccgtactaagaaaaattcttctgccttgagatgctgttaatctgtaaccctagccccaaccttgtgcttgcagagacatgtgctgtgttgactcaaggtttaatggatttagggctgtgcaggacgtgctttgttaaaaatgtgtttgaaggtagtatgcttggtaaaagtcatcgccattctccagtctcaagtacccagggacacaatgcattgcagaaggccacagggacctctgccctagaaagcctgggtattgtccaaggtttctctccactgagacagcctgagatatggcctcatgggaagggaaagacctggccatcccccagcctgacacccataaagggtctgggctgaggaggattcgtgaaagaggaagatctctttgcagttgagataagaggaaggcatctgtctcctgctcatccctgggaatggaatatctcagtgtaaaacttgatcatacattctatttactgagataggagaaaactgccttatggctggaggtgagatatgctgggggcaatactgctctttactgcactgagatgcttgtgtaaagtcaaacataaatctggcctacgtgcacatcaaggcacacacagcacctttccttaaacttatttatgacacagagtcctttgctcacgtgttttcctgctgaccctctccccaccattaccctatagtcctgccacatccccctcaccgagattgtaaagatagtgatcaataaatactgaagaaactcagagaccagtgctggcgtgggtcctccatacgctgagtgctggtcctctgggcccactgttctttctctatactttgtctctgtgtcttatttcttttctcagtctctcatcctacctgacgagaaacacccacaggtgtggaggggctggcccccttcagctgtacacaagcaaacaccagattctccattctcaggttccattactctatgctgtacatttgattcttattccgccccttctgaggtatcttgtggtcttatacgctaccaggaatttgcaagtactttcccttcttgtgaagtgtttggcacacaggaaaacatgagggaatattagttactatacttgtcctttcatgaatcatttgaaatgtcacttcttcagacagcattctgggatgcctctcagttttgtcttatttataataatgcaatcattaaatataaaattgcaactcttaagtggggctaaggaagggaactatagaaggcattcaatagggaaatagaggaagcatctctcttccgggaataattgaagatcatttttcctgatcatcatcatctgctcacttaactgctgttcagaatggactgtgagttccacaaaggcagaagtctataatttatttttagccccagtgctcagaacaaaaactggaacacagcacttcaataataagactattgaacaaataaccatatttggctgacaggctacagtctttccttcttcacttaccctcaaggtgctgtgctgctgctcagtgataattaaacatagaaaagatgcagctgggcgcggtgcctcacacctgtagtcccagcactttgggaggccgaggcggtgtatcacgaggtcaggagatagagaccatcctggccaacatggtgaaaccccatctctatgaaaaatacaaaatagttggctgtggtggcacgtgcctgtagtcccagctactcaggagtctgaggcaggagaatcacttgaacctgggaggcggaggttgcagtgagctgagatcgcaccactgcactccagcctggcaacagagcaagactccgtcacaaacaaaacatagaaaagatgcaaaagagtgtatgctgtatgccaccttttgaaaaaaggacaaataaataatatatacttgtattataaaaagaaacactggacggattcacagtaaacatgtttacctgtaaaagctagaaggtcaggggaaaactaggattgagaacaggataagatattcacaaatgtgcttttttgtacagctttaagttttgaatcgcatgactatgtgacctagtcaaactatttcagagtaaaaataaacagccagtagagtctctatcgccctaggagtggaggctgatcacagggtaatctaaggatgagatcataaaataaaacaaaccctccaagcaaaaaaaaaaaaaaaaagttttagatgccagaaaacatttgaatctacagcctgccacttggcagctaagtagcttgaaagctgttggagcaacactccttaattcaaccaaatactgtctcagcatctgcgaggtgcctgatctagtgcccaatgttggaggtgaaatgatgaggaaaaaacagacctgctctcttgaagggggccagcccttccacccctgtggatatttctcatcaggtgggatgagagactgagaaaagaaagaagacacagagacaaagtatagagaaagaacagtgggcccaggggaccggcgctcagcatacagaggacccacaccagcactggtctctgagttccctcagtatttattgatcactatctctaccatctcggtgagggggatatggcaggactatagggtgatggtggggagagggtcagcaggaaaacatgtgagcaaaggactctgtgtcataaataagtttaaggaaaggtgctgtgtgtgccttgttgtgcacataggccagatttatgtttgactttacacaaacatctcagtgcagtaaagatcagtattgcccccagcatgtctcacctccggccataaggcggttttctcctatctcagtaaacaaaatttacgattgggttttacactgagacattccattcccaaggacgagcaggagacagatggcttcctcttatctcaactgcaaagaggccttcctgttttactaatcctccagggcccaaaccctttatgggtgtcgggctgggggagggtcaagtctttcccttcccaagaggccatatctcaggctgtctcagtggggagaaaccttggacaatacccaggctttctagggcagaggtccctgtggccttccgcagtgcattgtgtccctgggtactcgagactggggaatggtgatgacttttaccaagcatactgcctgcaaacacattttaacaaagcacatcctgcacagccctaaatccattaaaccttgagtcaacacagcacatgtttctgtgagcacaaggttggggctagggttacagattaacagcatctcaaggcagaagaatttcttagtacagaacaaaatggagttccttatgtctactttcttcatagacacagtaacagtctgatctctctttcttttccccacactctctgccttcaggaagtttagaatccagatggggaatgcacatggaaatctacaaaatgttaaactgcagttcccctaagtgctaggaagaagaggaacacgatcctatggaaggccagactggtgagggaaagttgctctgaattagtgatgtttgaagatcctgaaggaggaaaaatgcagaaaatggggggaaagaaaagttcaggcagaagaaagagcatgcacagaggcctgaaggtgatgaaaggatgtcagcagcatatgaggggccaaaagagggccagtgtgtcagaacagggagagcaaggtggagtatgggagagggaagaaagaaccggaacatgcagacttgatggccattttaaggatgtttgccattgtccagaccccaagcagaacagtcattgcaagtttcaaagtttaaagctagagagtttcataatcacagctctattaagcttaaaaagtatgctatatgaggaatccttggctcagtgcgtggcaacctttttgtcatcaagtcacagttttgattaagttcaggcacacctatactcttgattcctcctcttcccctcactgggactaataacattacttgtattaattgtgtttcttgctagacactgttttaaggactttacatttacttctcacaacaaacctgaggcagatattttaaagctaaagtcaagaccttggtaaattagttgctctatggcacatggcttgggcatggcagggcaggattcaaactaagcagtgtgacttcaggatacattccaaatcactatgcaggactgcctcttggcccaggagggactgaggtcatgggagcagatgaagggtgatcttcagtgaaactataaggatcttgggtttgggagcagacatgatgtgtaccaagcttaggtatgcactgagcctccttcatctgggaggtcaagctctgaaaggtacgttaagcaattgctcagggtaggcctggccaactcatccttagaccctgatagagcataagcaacctgaccttaccatggaaggatgtgcagattcacaaaggccagatgtggatagggcctggttggtggagcgcccatttctgattctttgctggagagtatctgctctgaatctatcccattataatgtgggggtaatgatggggcactaatccaggatttagggcaaagatgcacaaaattaggtgtgcaccagaaagccctcattacaaatgcagagtgccaggttccagccccagaggatctggtttaggaagtctaggggtgactcagggatttgcatctttttaaatttctgagagacttgcggcaagaagctcacagacaattacaaatactcctggagtattctgtgcttacaaatgctgtaacaggctctcctcagtacacttaggtcttggctcaaattacatccagaaaagccttcccttggagaaaaaaaataacatatttttaaaagcccccatcactacgtatgcattagtatccactactagtctttttctccttcctaacatcgtacaatctgtttctctgcctcactcaatggtaaagtttataaaggttattcctttgcctgtattgttcaccgatccatcctactgtatctaaaacagtgccttgcacagtgatgatatataaaagttacttagtggccaggcgcagtggctcatgcctgtaatcccagcatttgggaggccgaagtgggtgaatcacgaggtcaggagtttgagaccagcctggcaaacatggtgaaagtccatctctactacaaatacaaaaaattagctgggcgtggtggcaggcacctgtaatcccagctactcgggaggctaaggcaggagaatcgcttgatcccgggaggcaaagtttgcagtgagctgagttcgtgccactgcattccatcctgggcgacagagcaaggctccatctcaaaaaaaaggttacctagtaacccaggatttctgttgaattctgacctagccacaaggcaaatttccatttattttcctatgagcagcacttactgtaacttggacagtgtatccatatgggatgaaggttaaaaaaccagataaagaaggccaagagacctactcccagaaaagtgagaatgatgaagataaatcatgtctcaaaaaaaaaaaaaagaaaagaaaaatcacatctcagttcagcaggtcacagagaagctgggatctctgaaatggtaaccctagcgggtgataggtcttatggacaaataaaagcgtcatctctaagacgtcccaaaagaaacccacctcctcccatctgttacagtctcatccattctcagagactaagattttcctcctcctttgtgttctacttattctaagagtccttttccttttctgctctgccccttttatatttggctaagtctttctaatcacacaaaagttgtgagtgacaattctattctttacaactgtcattcccttcaatgacaaaatacgcttctctttccaaatcattctctctccaaatcaatacataattagtttttgtttttctatgtgttgggaaatattagatcatgcaaagcagcctctccagcataactttctgggatgttggaaataatgacaaagagtcctcattgtctgaaagttctgttcactctgctgtccagtttagtagcctctactcacatatacagctcttgagcagtgagggaactgaatttttaaattttgtgttcagtttctttaattctaaaatttaagtagctacaaaacttagcagggaatttgtaatctcttggagagataagacacgggcaaaaacaaacaaacaaaaagccctcctttttgtactaaggtgcttaagtaccattaacagcagtccttctgctactccttgaacaataaattatcgcgtcccctggacacagttactccatgtccatttcacctaatgtagatatttgcaccgcctgactagattgcctgagtgtaatgataccacttaaaattaaccccacaaactctccaggagaccacaaactttttcttctttgacctcagctcctggaacaggacaaggtacaaaggaaataattttaaaatatttgtttaatgaaacaaattgactagtttcacagatccctctgcataatacaaagttctgaaagtttatggtcctggttttcaattaatcctccacactggcactggtctaaggaaactgaattgacacatatgtgtcccacattccaccattacagtattagccctttcccaccaactgccccttatgaagcttttcagtcactgcaacactcccgacaccaattatctcatctgttttaaaaattcacagtacttcatttcctccacttaaaagtacttgggcttcctttactcatttaattgacacagtcgagcaattgctgtgtatgtgcttaggttaacatcaaatttgcctgtgtatcacagcatacattttaataggatgagtttatcaggctatctcagccttatacatgttctctcagtgtatgcttttcggccacataatgaactacaaatttttgctcaacccttttccacatagatctgagttttcttcctatgggttttctgtaacataaaataagacataattgatcacggaaggcacaaccacattcactgcattcacaaggtttctgtcctgtgcaaatcctctgttatctcctgaggctgcacatctgaccactggctgtcccacaaggactacgttcctgtttgcgaggaggccgctgatgtttaatgatgtctgaggggccacagaaggcacttgtgtagtcgccccgttagcagagtttttctcctgcatgacatcactggtgtgtaatgagctgtgcctctctgcaggaggattttccaccttggctgcctcttgtttctcccttgtgtgtattctcttatgcttaaccagacacgacatatacgcaaacgctttcccacactcgttacagccatagggtctctctcctgtatgagtcctttgatggacaatgagcttttgctttgtgctaaaggctttcccacattcactacattcaaagggtttctctcctgtgtgaattctttgatgtttaatgagacctgatttctgagaacaggattttccacattcactgcacacaaagggcgtctttcctgtgtgaaatctctgatgtgctatgagacacgtcttctgaatgaagccttttccacattcattgcatatataaggtttctcacctgtatgaattcgctggtgtacaatgagatttcctttctggatgaagccttttccacattcactgcatatatagggtttctctccggtatgtgttttctgatgtatgttgagccgtgatttcttgagaaaggctttgccacattcagggcattcataaggtttttctcctgtatgagttcgctgatgttcagtaagcatgaactttctggagaaggctttctcacatagactacatctgtggggtttctctcctgtatgcattacctggtgatcagttagccaagacttcttgatgaaggctttcccacattcactgcacacatgatgcttctctaattttcgtgttttctgatgcttgggactgatgaattgggacttagtgctgatgagtttttgacttgcagggaatttaattgcagtatgaagtcgttcatggttagcatgaagaaaggagtccccatttccagtaaactcaacagagttctttatttcatagcctttgctctggttaactaaagttaaattggatttcaaactttttccacgtaagtcaaatatatcatgattttgccctaacagaaactgacttttgctgcaatgaacaatattttcaaatgcatcatgttcatgacatggtttccttctgttcaccaggctttcactctgcaagcgctccagcacatgatcaactttccatatgtctagaaagaaaagaacaaagatttctatcatttagatttggggtaaaagtttgttgtggtttttttgttttttttgtttttttttttaagatggagttttactccgttgtccaggctggagtgcaatgctgcgatctcagctcactgcaacctctgcttcccgggttcaagggattctcctgcctcagcctcccaagttgctgggattacaggtgcctgctaccatgcccggctaatttttgtagttttactacagacggggtctcaccatgttggccaggctggtctcgaactcctgacctcaggtgagccattgtgctcagccaaagtattttttgttttgttttgtttttgggagacggagtctcactctgtcgcccaggctggagtgcagtggtacaatcccggctcacagccaaagtattttttgttgttttttttttgttttttggggacggagtctcactctgtagcccaggctggagtgcagtgacatgatcccggctcactgcaacctccacctcctgagttcaagcgattctcctgcctcagcctcccgagtagctgggattacaggcatgcaccaccgcacccagctaattctgtatatttagtagagacggcgtttcaccatgttagccaggctgatctcgaactcccgacctcaggtgatctgcccgcttcagtctcccaaagttctgggattacaggtgtgagccgctgcacccggccccaaagtattcttttttttaatgccttgatgtgaggtgtctcttagtaataaccctatgacctgagtgtaaataaaactccatgtttaatgttccttgcacattggcaaaaagtaatagtataaacaaactaaaaggtgaaagcagttagcataaaacaaggttagatcactaataataaagacagatttggctgctttctaaatgtgccttgcaaaacagaccttaaaatacaagcaattcactgtgaccagcagaccagaggctggaggcccatttcgtccaaagaacagattcattcattccacatactcttactgaatgatcaccgtgtgccaggtatggtgctggtgttggggataggcacaagaatcgcttgaatccaggaggtggaggttgcggtgagccaagttcacaccattgcgctccagcctgggcacagagcaagactctgtcttaaaaaaaaaataaattaataaaaataaataataataatgaataatttttaagggaatgagtcagggaagtaatcatatgtgtggaacacaccaggcagggtttaggaaagaggatggaaatctctttgtgagcaagatggtattatatcacagagatcactgaaatgagaaatttgacaggtaacatggtttactgggacttggtgtcatcagaatacgatggggaaaaaaacgaaagcaaattattaaatacagaaaggaaccaaatggaagtaggcgggagttgagaatgtaggatgttaaaaaaatgacttttttacttagagatgcatcatgactagcagagacctttaaagaagagagctcttcaggcaggtaatacccagatggccaagattcaggatgtacaggaacaaacgaaaatccaaacttaatggttttcttggaggaaagatgattctagttccttgcagttactaggaactcaggggagagttgccatgaagtaaattacacagaactaaaatctgtgttagataacaacagggagatgtcagtttgggactctcctccagggagcggaaggagtttaaacttactagaatgaaggcaattttgaagagtgaagggcacagatgagaaaatggagaacgggacctttggagaacctaagaataaggaaaaagagaagcgaaggaagccaaggcacagcgaaagtccagtttaccctgaggaagccacatccatcacaggggaggtgttaggaggggaggtcagcattagccaaggggcacaaaggggtgggagtccgaaaacagtgaggacttcaaagtttcctctttggaaagaggcctggaaggtggaatttcgtaacaagagaggtggaacaacatgaagaagggaaatacttgaaacccgaggaagaagaaaattatgcaggcaaacaaacaatatgtagataaaataatcagatctctgaggagataaagagtttttgttttgttttgtttttttttaactctaaattcctacaaagaaaaactggtctcacactgggagacagatgagtagaggaactgtttacatatcctcaaacccccttcacagctgtgctgccttctctgactgtctagaatgtgacttccatagccttctgtcttgtgggttctctcacctgaacaggctccactgtggattccatcttcaattgtccacagttgttctccttgttccaacttgaagagtgcatccggtttgctggcttgataccctgttcatggaaaatgatagaggacttagacatatcaaattgggctggcaatgtcaagaaggaagaatgttacatttcaagaaacttgagtttcttaaaatacccaaaatttagtttcttatctgaaactatgaaagtttcgtttcatatctgtaacatcaaggtttttctcttacaagagggtagattacaccgtcttgtgtgggagcaagagaaggatctgagaatctaccacttcagagtactgcaggcattccaaagaggtaggcatctgagaaaggaaggccactgactaggcaccctctgagtgacacagggcagctgtcctcacccactgccaccaggttgctgtagttctccaacatcacatcccggtacaggtccttctgagcagcgcccaggagttgccactcctcccaagtgaagtccacagccacatcctccagtgttatggattcctgtaataacagtcctgtttaataaagtgatgtctttttgatgatgtggaagaaatgctaaagtttttctgctcatttccactctacaggctgtgtgcatataccaaatagttttttttttaatacaatgtggaagaagtaaagtcctaatataatattctgtaactgtatattcagtcatcctccattcacccaattggaagtttctataaagtgtagaagttaaatcttgctaacctaaaaacaatatatttatacattttatatatgtaaatatatatgaatatatgtacatatatttattttagatacatgcaaatgaaagacatatatacagccatcctttagtatctgtagggtattggttccaggacctcctgaggatactgaggtgtctgatataaaatggcacagtattggtcaggcacagtagatcacacctgtaatcccagcactttcggaggccaaggcaggagggtcactcgagcccaggagttcaagaccagcctgggcaacatgagaccccatctgtacaaaaaattaaaaaattagctaggcacagtggtgagtgcctgtggtcccagctacttgggaggctgaggcaggaggctcatttgagcctaggagttagagactacactgagttatgaccatgctactgcactgcagcctaagcaacagagcaagactgtctctaataaaataaaataaaatggaatagtacttgcagatttgcatgtaacccatgcacatcctcccatatacatttctgtttttttgaaatggagactcactctctttcccaggctggggtgcagtggcataatctcagctcactgcaacctccgcctcccaggagcaggcaattcttctgccccagcctcccaagtagctaggactacaggcatgtgacactacgcctggctaatttttttttttttttttttgagacggagttttgctcctctttcccaggctggagtgcaatggtacaatcttggctcactgcaacctccgcctcccaggttcaagcgattctcctgcctcagcctcccgagtagctaggattacaggtgcccgccaccacaaccagctaattttttgtatttttagtagagatggggtttcactatgttggccaggctgttctcaaactcctgaccttagacgatccacccacctcagcctcccaaagtgctggagttacaggagtgagccaccgtgcccagccccatatactttaaattatctttagattacttataatatctaatacaatgtaaatggtatgttaacagttgttatactatattgtttagggaatcatgacaataaaaaagtctgtatgtgctcagttcagatgcttaaaaaatatatattttcaatcctcagttggttgaatccatggatgtggaagccatggatatggagggccaaccatatatcacaaatccaggcctcctatttttctgatggactaattataaactgagggttcctatgacctccttgagtttgataatttctcaagaagaaggagaaaatcaagtaatggagaaacaatatccaaagatctaacactgaaaatttttcagaactgattaaacactccaaaattcaaactcaagaaatccaacaacttttcaagcaagaagtctacacgtaggcacaacagattgaaactaaattacaccagatacaaagggagactataaaaaaatccaaagaccaatgacaggttacctacaaaggagacaaaattttctgacagctgactgctccacagaaatcattatagccaataaatattggaacaataaatgtaaggtcctcagctcttggacaacacagcccaaccttgaagaccatttaggactgaaaggcatggctggcaaaggacctacagccctgtaatagtgacaattaagactacttatcaatgaattgtcaatctcttgtctcaggatgcaggatggctttaaaggatactgctggtgggaaattgagtcattgaagacccagggaacagcagaaggtacactctatactcattttattacagaggccagtgaacacacttggtagatgatacaagtacttaatcctggttggtttacccattctaaattatttatgtgagatagctatctatttggaaaaaagtaaagtgaaagtcttacctcaatccacactcaaaaatagtttactatatgacagatctatggcaggcagatttgatggctcaatgaactccaccctcccagtgttcacacctttatgtagttcccacttacagggagccaaaggtccgtgggacgtgaccaactcagcattccactggaggctatatgatcaaacagcaaactgtttatcatgaatgcaggatgtgagcaaactcaccattgctcctgccgacagaaggttttctggaggcaatcactccctggtgctgaggttatctactgcaacatttagagaatgtagtcttgcaagcctcctctggactgagcagctgacccctacttccactgcacccccccaactatctcttttgcctaataaatgcagagggctgtgtaaagctcagggcccttgtccactagaggcaaggtaccccctgaccccttcctccgaatatacttttgtctcttgtcttttattcctgtgttcaccccactgtgttcagtccccctaggtctgtgcgggttacaagtggcgcccaaacagggacagaattgggtgctctacaccctctccttgagcagggactggcctagtgacttacctctattcagaatatggcaaaggcgttggaatctcacctccttaattaagctatacatgtttaaaaaaattattcaatgagaattgttaaagcacagtaaggaagactttattcagggccattatgacaggtatatagacaaatgtaatgggattttgcagtggtagagggtgaatggacttaactccaaatatcagcataagcaagtgggaatttatagccaaggagcagagtatgggtcagtaatacaaaattaccaagagggccaggcacaatggcttatgcctgtaatcccagcactttgggaggcaggaggattgcttgagcccaggagttcaagagcagcctgggcaacatgacaagaccccatctcaattaaaaaaaaaaaaaaaaggaaaaaagaaaaaaagcagaaaagtaaaagtaaaaaataaactcatagtcaacccacccccgccacacacacacacacaaaacctttatgatcttttatcatttttcagattaaatacttgattctctcctaacccccaatggtgacaaatgcatttttttcaagtatagctataaactgatggaattttatataattaatgttcttcaatcatttgcaatcattggtctttggatgttcaaagtgtagcatcttcggccaatgaagagtcccttcaagttggctgctatgttctttgaaatatgattctatcatgtaaaatatatatatgtgtatatcataatgaatatatatatctacagatagattcatatatactcacacttttattaatacatatatagacatagatccacaaacagatacagtgacaggaagtaaatattaccaaccatttacagaagtggattaggaagaaaatatgtgaaaagaaaactttttctcttttcttcaattttactaaatatagacaaggtctcactagattgcccaggctagtctcaaactcctgggctcaaggaatcctcctgcctaagcctcccaaagtaggcataagccactgcactcagccagaaactttttttttttttttttttgagatggagtctctctgtcacccaggctggagtgcagtggcaccatttcggctcactgcaatttccgtctcctgggttcacgccattctcctgcctcagcctcccgagtagctgggactacaggcacctgccaccacacccgaccaattttttgtatttttagtagagacagggtttcacggtgtgagccaggatggtctcgatctccagacctcgtgatccacccacctcggtctcccaaagtgctggattacagccatgagccaccgcgcccagccgaaatttattttttgatatgtgtactttcttactttactgggacacaatcacagatgacctatgtggctgatcttaggtccacaccctcccagaagtcaggttttaactttagcctctagttctggaagtttctggcctatcatagatcacagatctatcatagttcgtatttttaggctgtccagtggccaaaggacccaagcaaacaaagacactaccattagcaagatattccagaagcccagagctcaccctccattagcttgaacacaaaggccaaaactccctttgttcaattatttactatacaataaggacttggcattttctacaaggtgaaagtctaaaggaaatctgtaaactccaatccaagtcctgttcagacaatatcactttcaactccctgtctccaaatctatattcaaacaccagttcagctatctgttcattgagaaccatttgaaagtcctggaatcctgccatattcccaggatgtctaggttttattccaagttaaatccagactgccacaaggctgaaattaacttgtgttggtccctgtgtttactgtttgcttagtctattccgtaacagtatataaggagtccttcaagaaacagccacaggaaacctgcatctgaatttatgagaaggctgctattctggacaccatccaccacatcaactctaggaagaaccactgaagaaatttcctgagaccaaagtgccatgaaataatggcaacccccaggaagtaatctgttttatcttcaaaaacaggacataccatgtaaattatgattttcttgtgacattggctgtcagagatattagatgcaagctgacagctaatataatccacaggatcctccagccatgcatggtgtcacaaaattcataatttagtgttaatgctatgaacattatattccttatcctactattttgcatgatattgagtttaaaaactaagcttacttctctccagatcctgctttttgaaatttatactttttatattagtgaaattgatgtttataggcttctacaaatctattatggaacaaaggaaagaataaaacaaaccaaaagtcagttacctgggcctggatcattttcttctgttcttggaagacagcattcaactgggatggtctgtctttgtatcttctggccttctcttcagaagtctcagttttcaatcaagtgtgccccaagaaatggtgaaccccaaatccacttcctccctcttcaggttatgttttttgctcctgaggagtcagaacctgtgggttgaagagcaaattcaatgtaagtggtacattttttccaggcccagatactgtcactgctgctaggcactcatcttaaagcaatgcccccaatatagttaactatatacctttgtttggagccccagcggattttatacctgtggccaataatgtctaggattcttaatgtggtggaggtatgcctttcctctgtgacgtttccgtggaaggactgtgaaggcaggtaggaaatgagacccaccatagcaccagcctcaggagatggtgaactcttaggcagattagttttagaaaagagacaatcagcaaggagaggacctggtctttgttttcctttaaatcatgtgtgctcccacacctcttcaaaagtctttgtacatacaccctgtgaagacatgtacttcagtttgaaagccaatgtactgggcaaatcataagcattgtcataaaaacagtactgacaatattttaggaggttttaaatacataaaaagctaaaatacacaataatttactggataattaggtggtgaataaagttgacgtgctctaaggtttctgtagaatggaaaagtgccaattagcagaagaatatgacaaaggttgcacactacatgtaatctctagttacaattaacactagtaagtccaggcacagtggctcacgcctgtaatcccagcactttgggatgccgaggcgggtggatcacctgacatcaggagtccgagaccggcctagccaacatggtgaaaccccatctctataaaaatacagttattccagaagctgaggcagaagaattgcttgaatccgggagatggaggttgcagtgagacaagcctgtgccattgtactccagtctggtcaaaaagagcgaaacctcgtcttaaaaaaaaaaaaaaaaaaaaaaactagtaattgttttaaagtacgtaagttccatgccaacaaaagggggaaatgtaataacaagaaattcatccaaaagaagagaatcaaaaacagagcaaaaagagcaaatacaatgcatttagatagctgttttaaaataaaatgtactaagaaaattacattacattaagtattttatgctaagtaaaaacagagcatggatcccagttaattacattaaatataaatgcctcaaaactgtcagaatggattaaaaattaaaatccaataacatctggggtttattttattttattttaatttttgagatggagtctcactctgtcgcccaggctggagtgcaatggtgtgatctcggcctcccgggttcaagcaattctctgccttagcctcccgagtagctgagtttacaggcacctgctgcagggagccgaaggctcgtggcccgtgggacgtgaccaactcagcattccactggaggctacagatcaaacagcaaactgtttatcatgaatgcaggatgtcagcaaactcatgactgctccggctgatgaaggtttgctggaggcaatcactccctggcgccgttatctactgcgacatctagagaatgcagtcttgcaagactactctggacccctggcgccgttatctactgcgacatctagagaatgcagtcttgcaagactactctggacccctggcgccgttatctactgcgacatctagagaatgcagtcttgcaagactactctggaccgagcagctgaccccttcttccacctccccttctcactgtctcttttgcctaataaatatgaagggctgtgtaaagctcagggcccttgtcccctagaggcaaagcgcccccgatcccttcttccaaatacactcttttgtctcatctttattcccgtgttcaccccactttgtttagtccacctaggtccgtgcaggttacaaatggcaaccagaacagggactccaagcacgcccaactagcagcatccaaacatgggacttcaaggacgtgaatgaagaaggtctgctggagcagaggaactgaaattgacaaggcgaaaggggaccctgggaagagtctgccggcagcagatataaggtcagtgccctaaagaggtactgggagcagtgctttaaagaagtactgggaagttttctgactcagggtaacaagggaaagaatttgtctattgaagaaaaacattatgtgcagttgcttaaagttctgttgagacagtctgcagctcaggttaattcgcagacactaacctcctgcagaagccacaaaaggttattacacataacccatcgtttccacaggcaggcactcttgatgtggaaaattgggatacagcaggagaaggattaaaacaggctcatcaaaaaggtcttaaagtcgattcttctgttttctccacttggagtttagttcgtactgtacttctgccattatctcattattattctgcaggacagcaagctgaatctaaaaatctgaaagaatttgttgacccacccacagctccaattaaaaataaaaaacaggagagggaggataaaaattggcctatactgcctccttcagttgcagaaacatctgtactgcctccttcggtggcagaaatagaaaccctaatacaaagaatttaatgctctgctgccatagctggagagcccttaggacattgtgcttttcctatttccatcaggcctgatccaaaaaatccacagcaggttattcatgaacacaccccactagagtttaagttgttgaaggaattaaaagcaagagtggtaaatgatggcatacagagcccattcaccttaggattgctagaatctgtgtttggtgctatgcgttttttaccctttgatgtgagacacttggcgcgaacttgcttgtctgctagtgcatatctgacatggaatttaaattggcaagaaatgtgtgcagaccaggctaaacagaaccatgctgctggacacggagacattacagaggatatgctgttaggtcatggcccttattcagatgtagaacgtcaaatggcactcccagatgctgcttatcagcagtgtacacaggccgctaaatgcgcctgggccacaatcctgaagagggagtccctgtacaatcctttttacatatcatgcaagggttgcaggaaccctatgcacaatttcttgcaagattacatgaggcactgaagcgtcagattcctcatactgtggctgcagaaatgctaaccttaactttagcttttgagaatgcaaacgtgtactgtaaacgtgcactggcaccagtgaggtgtacaaaaaacttgggaaattttctcagagcttgtcaggatgtaggaactgagattcatcgatctgcaaagttagcataagcaatggctaatttagcagttgacaaatctaaaaggagccaagggtcaaaccctaaagtgggaaaatgttgtaattgtggaaaaactggacatctaaaaaaggaatgccgccagatctcaggacagaaaggatattacaatgcagttcactccctagcagaaaaaacagcaggactctgtactcgccataacaaaggaaatcactgggctacccagtgctgctcaaaatttcatcagaatggcaccccattggtaaatgagatgggggcctgcacccgggcccctcaaacaatgagggcattcccaatgcagaccacaaccccacttcagggatgggttcctggaggcacattgattccctcaacccaggaacaccaggaagtgcaggattagatctacccaccagagaaagaatcacattagttaggggagacaaacctatttgggtatttggggacctttaccgacaggatacacaggactaattttaggtaaaagctgccttaacttgcaaggcatcactgtagtcctaggaatgactgactccgattatgaaggagaaattcaagtagttttaatgtcacaaaatctttgggtttttgaactgggagaatatattgctcaattattgcttattccctgtgaattacacccttccccatgaaaagagaaatgaggaaataaagggtttgggagcacaactacatgggaaatctatctttcccaacccatagcctctaatagacctacctgtgtagtacacattaaaggaaagaaattttatgggcttatggacatgggagctgatgtgtcagtcatatctataggatgggcacatcaaacattacaacgcatgttgaaaaaacaaaaagggggtataggaggccaactaccacctcaatcaaaactacatttagccttatttactttaaattttctgactcccggtatggatggtaagactccagcagaaagacattggcaagtgttagaggaaaaaagcaaagtttatctgaaagtgttatggaaatccccagaaggacaacaatggaaaggcccggtagatttactgacctggggaagagggtatgcttgtgtgtttacaggagatgggacaagccatgtgggtgccctcaaggtgcatgcgaccatggaatgggagactggaggaacccagggtggccaaccatgggcccagtccctcctgtacgagctatgagtcagctgagcctgagtgcaaagatggagagaaggccaaccagagtcatgatgacatcaacccccataacctggggacaactcaagaaaaccacacaggaagctgagaaactactggagtgtcagggacaggcaaaacccctgattccatgctcttggccatgttagccataatgtcctgtgcactacgttttccctgtgcacaggcaaaaacatattgggcatatgttcccaatcccccagcagtatggcctatactttggagctcactcctcctgagatttatcacgatcagggagagtgggctccaggacccctaactccccgtgacatagaaaagttagactctcagaacaatgtcattaattataccactccactggaaggactccctttgtttatcaccacaaagacgtcgctcagccatagctgtcttgcaattcaagctcaaacatggttgagtcactatggaaaaattatgtacttattaggtcttggttctattaatgtaactggtgtgctaaccaatcattcccagtccagtcaccctaattgtgctgattatacagaatggattccattcaatagttcctaccccactctgtggacccagtgtcttgatccactggctagtaaacaatatatgtcaactgaagacactgtggattgggaacctaaaggtcaattagatggaaaaggtgaaagtcagaaatcatggcacaaacttcactggcattggcggcaagcttttaatgcttcttctttatacaacagcagaatccaatcccagtctgctgctcagattgcttggcatggagcaggctttagcccacctcttcctcagttgcattatctggggaggaaaggaccaattcaagaaactatatggaaggcagcactcccatttatgaatggcaacatctggattggaacactgtctaataatagcaatagtaagcaacacagtcttaatgttgcatttgtaaagaatatcaccactcagtttacagtttgtgtttttaatccttatgcctttttggcagctaagaagaaccagcttcaggtaaacaatacccaattgacctgtaaatcttgccagttatatcacactgcattaatcatagcacattacgaacacataatatctctactttgataatgttgggttgcatccctgggctatggattcttgttaatctgtctgagccttgggctgccacacctgctttgcatttttgtaacacttcttctaactcagcttactcactgtgtccatagagccttaggcataatttttgctattgtttccttggtcaaactaataacttctgttgtgatatcttctgtaactctgcataattctattcaaacatctcagtaggtggagaactggacacgcacagctgaccaagcgaggctacttcagaataaaattaacactgagttacaaactgaagtggcaatgttgaaatccatggttctgtggttaggagaacaggtacaaagcttgcagttgcagcagcaattgcgtcatcattttaatcacattcatatttgcgtaactaactcagaatataaccaaagtgagtatccgtgggaccttgtgaaagcccatttgcaaggagctttcacatccaacatcacctttgatattggtgaattacaaaacaaaattattgatttaaataggcaaactcaagaatttcagccttctttagaagactggaccgaattccaggaaggcctggagagcctcaacccttggacctatctaaggcaccacattaacatcttatatgtagttcttggaataatgttgttttgtctctgtcttcggtttatagtctgtaaaatcggatggaccaccaattggagaatgagagcctcccagcccagccttacattctttcaattaatacataaacagaaagggggatatgcagggagccaaaggcctgtgggacgtgaccaactcagcattctgctggaggctatatgatcaaacagcaaactgtttatcatgaatacaggatgtgagcaaactcaggactgctcctgccaacataaggtttgctggaggcaatcactccctggcaccgaggttatctactgcgacatctagagaatgcagtcttgcaagcctactctgaactgagcagccgaccccttcttccacccccccaccctcctatctcttttgcctaataaatacggagggctgtgtaaagctcagggcccttgtccactagaggtaaggtgctccctgaccccttctcccaaatatactcttttgtctcctgtctttattcccacgttcacccccatttgtgcagtcccatgggtccatgtgggttacggcccgccaccgcgcctggctgatttttgtatttttagtagagatcggatttcagcatcttggtcaggctggccttcaactccggatctcatcacacacccgcctcagcctccccacatgcggttattatagttgatatgtctgaaccaaaatgatatgggaagcttgagaataaaaggttggagacaatatgccacagagagagtaaccaaagataatctgttataactatatctcagacaaaactgaccagaaatcctaaagaattaacagagagaaagagaaacaatgctcactgaaaagaggtgaaatttggctcttcattcatagaaatacaccatatgtatacccctaacaacagtcttgaaatgtatacagcaaaaaatagaaccaaaaacaagaaatagaaaattcagactaaagactttaacagacctttcctagtaactgacagaacagaccatcaacaaacaaaataaaatttataaatgagaaagaaatgaatcttttatctgaggaatgtgactccctttaaattatcaggtctagagaggcattaaaatgtgacagcagtctttctgataggggttcccctgaaaaaaagaaaaaagaaaaaattaaaaactaaaaaaaaaatttaatgtgacaatagtcacatctcatttccccctcaagctaaataattatctcttaaagccacttgctatgtaggctctagactaactcacactgagtagccataaaatgccattcactggacatcctaactcataaaaccccatagttaacaatgtacagccaattgttaattgatattatttctgtaaaccaatgagaattcttgccaaacaactttatgtcagctcacggtttgttcccttttgactttaaaacctgtttctaacaaaatcctaacagagcacttaaccaaggcaacctgaaagtattttcccaggcagctgtcctcattttggctcaagtaaactctttaaaattgtattttgtgcagtttcctcttttaggctgacataaacgatatcatttagaagaactcgaatatatttttaaaattagatttactgagataaattttaacagttttaaataaatgcaaagatgtactataaagatgggctggaaaacaaagcattttaaaaatgtcaagtctcccaaatctacagattcaatgaaatcacagtcacaatcccaaactgatactgaaaagtttaaatagctataaacttttttttaaagtttgaaaaaaaagttagaagacttgccatatcagttatgaggacttataaagctactttaattaggacagcacaatattagtacaataacaggcaaataggacaaaggaacagaataaaatccttataagcagaattaagcacatatagagactcaatggcaatgatagcactacagggaagtagataaaagctgtcttttcaataaatggaactaagggcgccgtggctcacgcctgtaatcctagcactttgggaagctgaggaaggtgtgggggaaagagagatcagactgttactgtgtctatatagaaagaggaagacataagaaactccattttaatctgtacaaagaaaagttcctctgtcttgagatactgttaatctgtaaccctagccccaaccctgtgctcagaaacgtgtgctgtgttggctcaaggtttaatggatttagggctgtgcaggacgtgctttgttaaaatgtgtttgcaggcagtatgcttggtaaaagtcatcaccattctccagtctcaagtacccagggacacaatgcactgcggaaggccgcagggacctctgcccaagaaagcctgggtattgtccaaggtttcctcccactgatacagcctgagatatggtctcgtgggaagggaaaaacctgaccatctcccagcccaacactcgtaaagggtctgtgctgaggaggattagtgaaagaggaagacctctttacagttaaaataagagaaagccatctgtctcctgctcctccctgggaatggaatgtcccggtataaaacccaatcatacattctatttactaagataggagaaaaccaccttataactaaaggtgagacatactggcggcaatactactctttactacactaagatgtctgtgtaaagtcaaacataaatctggcctacgtacacatcaaggcacaggacctttccttaaacttatttataacacagagtcctttactcacatgttttcctactgaccctctccccaccattaccctatagtcctgccacacccccctcaccaagatggtaaaaatagtaatcaataaatactaacaaaactcagagaccagtgccggtgtgggtcccccatatgctgaacaccagtcccctgggcccacttttcttcctctgtactttctctctgtgtctgatttcttttctcagtctctcatttccaccttgcaaaaaatacccacaggtgtggaggggcaggcccccttcaggcaggtggaccacttgagccagagttggagaccagcctggccatcatggtgaaaccccatctctactaaaaatacaaaaattagccaggcaaggtggcacctgctggtaattccagctactcgggaggccgtggcacaagaatcacttgagcccagaaggcagaggttgcagttgagccaagcacgccactacactccagcctgggcgacgagagcaagactctatctaaaaaaattaaaaaaaaaaaaaaaaatcaataaatggtactggggatggggacagaaagttaaaacccccctcacaacatacacaaaaaccattttagaatcaactgtcaatttcaatggtagaaacatatcaataaagctttaaagaacattaatataggagaatctctcaatgttattagggtatggccagatattttaaagaggccacataaagcaccctataaagcaaactatatcctgctaggggaactgtaagtggtacaaccactttagaaaacagtttgacatctatttagacggagtttatacacactctatgaagcagcaattttcctccgaggtgcacatctagatatacatctctgcctcccccatatgagagcacatatgaaccaaaagacatttacacaaattttcacacatgcattattcttaataatacaagctttaggtaatacaaatgtaattaataatagaaaaaactgctatattttacataatggaatgtgatagaaaacctattatacctttggtccagcctgcaagaatgctttttacatttttgaaagactgtaaaacaaaaagcaaattagcatatgcaagagaccatatgtagcctgcaagccctaaaatatttactgtaaattcgcctgatccttgtcattgagcaaagaaaatatactcagatgcaacaggaaagaccctcaccaataatgagcaaaagaaggctgacacaaaaaaagagtgatgtacaattccactgatatacagagtttaaaataggcaaaactgtattaactacaatgataaataatgattaattatataaagaaaagcctaaaatacttttcggtgtgagaatggaaaaagactcacagaacaccactggtgtgctgaccatattctatttcttgacctgggcaatgactgcttatacatatattgcctccatgataattaaattgtacatttaaaatatataaatgtagaaaaattaacaaagtaaaggaagagatcaaccataccaaacagtttacctccaggaaaggtgttaactccagacaacacaacgggtgaattttacaggtgggtaataaaacaagaacgtccactaacaccctattttcctactttatactggaaagttgagccaatgcattaagataagaatgaattataagcattacaaagtaagacagaaaattaatgttattttcaggcgatatcatcacgaacatggaaaaagagattcaagaaattacatatttaaaaaagaaaatgctccctcagaaactcccaggcagattttcacatacatagttggctagaattgcaccatacgcctaagctcatttccatgtcaaacctatcactagcaatggcaattggaaccagcaagattggctaagaccaacaaggccttactaagaaactgggatttgggtcgccttgccacagggatgaatacttcacgaaatggagattctgttaagaaagtgtgaatataaggcgggcaagcaacactcactatatattaagaagtgaaggccgggcgcggtggctcacgcctgtaatcccagcactttggaaagccaaggtgggcggatcacctgaggtcaggagttcgagaccaacctgcccaacgtggtaaaaccctgtctctactaaaaatacaaaaactagccgggcgtggtggcgtgggcctgtagtcccagctactcaggaggctgaggcaggagaatcgcttgaacccgggaggcggagattgcagtgagccgagatcgcgccattgcactccagtctgggagacaaaagtgaaactccgtctcaaaaaataaaaaaaataaataaaaaataaaagaagtgaatgcagaggttggcaacattttcgattttgccggccacgaggtctctgtcacaacaactcaaccgctgcctttgcagccatagacaatatataatcggagggtatgactgaacttgaccccccgatctgtaaatagccaccccaaggatcagaagagtagatatatggtttcgaactaatgctgggggctgtgtcgccttttgccccagtaaccgaggttcgaacctcaacccaggacccagggctccaaagtctcgaaagcttcagccctcacaagcctttgtaccacagacactggccccatgcctcttactcatccgaaccacggaccagacactctacagcgatggacatcctcccagactccaacatcactgagttccaaattaaatcctgaacccgaagcagacgccgcatcgatcctaatcgccacctccatcctttacaagcagagtgatccataccttgacagttaggacacggccgttgatcactacagacccttagtcactgtactcacaccaaaggcacgcggaccacagacagggggatcacagactcccaccaggtacctcccaaatgcctataccccggcgctccccagtcttcctgccaaaaactatgtggtccagggtacaccacgtcctcagatctcccaaaccttccactgagacaaaacctgaactaggacaaaaaactttcagggacaaaaccacacactgacctctattttctccagatacacaagaagggcctcaacgttacacttccgtaaactgctcctacttctggagtcctcgcacgggtttatggtccacctacggcggccgaggagaacctaaaatgtttaaaagagcaaggacaagcgcatttacggcatttcctactctgtaaaatggccgcgcccatagccgtggctcctgacggcagccatgtttgaaaattggacgcacagaaggcagtggcaggtttttgagccaggagccagggaagaagagaagtcactgaaatcgcctcgtttcctggcacttaaagtcttgcgaaagggggcagattttcagagactcaggctttatcaggcaaatatggggcaagctaaattgcctttagcgcttttccatccactttgttaaatttaaaaaaaaaggttttgaaaaagacaagtaacagtgcagccaggtgtaggtatcccagagaatgaattggaaatggaaaaggtaacagatcaggtagaaagggaaaaggcaacacatcaggtaggcagacacccacgggaaagcgtctggcgaaaattagcttgcaggaagcggtttttaagaacagaaaaatagcaggtattcgggggggcgggtggtgaagaaagaaaaaaattataattttttttgagacggagtcttgctctgtcgccaggctggagtgcagtggcgagatctgggctcactgcaacctctgcctccctggttcaagcgattctcctgccttagcctcccaagtagctgggactacaggcacgcgccaccacgcccagctaatttttgtatttttagtagagactggctttcaccatgttggccaagatgatctcgacctcctgacctcgtgatctgcctgtctcggcctcccaaagtgctgggattacaggtgtgagccaccgcgcctggcctcgaaaaaatgattattatttacaaaaaagaagaagaagaaggaggaagaggaggaggagaaggaagagaaaagaggagaaaagaagagaaaagaggagaggagaggagagaaaagagattttgagaatgaattacgatgtgagcctggccacgacagactaaaggaattgggcctcctagaaaggccacttttagtaaaggtgccaatgggaagagcagagccagaattgagagtataaaaatattgttaagagtttttgacaaaagtgccaagacaattcaataagaatagtcttttcaacaagcggcactgggataattggatatccacatccagaaaaatgagttaggaccctcaaaccatacacaaaagttaactcaaaatagatcatagatctaagtttaagagaaagtataaaacttagagaaggaaaagggagataatcctcatggacgtgagttaattctgagaggagagtaaaggatgacccacaaaacaaaataaaattaataaagtggacttgatttttttttaagtttgtgcttctaaacacaacatttaagaaagtgaagtggggcacggtggctcacacctgtaatcccagcactttgggaggccgaggcaggcggatcatctgaggtcaggagttccagaccagcctggccaacaaagcgaaaccagtctctactaaaaatacaaaaattacccggacgcggtggcgcgcgcctgtaatcccagctactcgggagcctgaggcaggagaatcgcttgaatccgggaggcggaggttgcagtaagccgagatcgcgccactgcaccccagcctgggcgacagagcaagactcctcggtaaagacaccacttcgtcaccctgaattactctgatttttatgggtacaatgagaatagtggacctaggaagaaaaagtttttaaatagaaaccttcaggacagatttggacttgaaagactgacaggaagtgtttccagcatccagttagtctcaaagcaaccactaaccttcaactgcacacctgaaagcctccagcctcattacattctcaaacacagacaagccccgtcttcctctaaataaaattgccttcaaattcaatttaaaacttaccacagaggcactcctttgacactcctccccctagacctttcattcacgccactcctcttcctagctcgggcttctctgtatctgagccccatattaaattgcaaatctgagcaaaaaacagcattcactgagacacactttccccagttttctattactgagactcatgaaaagtgaacatatagacctcaagctctgtccgtgggaccctcagtcattaaactcttaaaactaagccttaacctttgacatcccaagggtctctttctcacacccatattcctcggtgactaaactgaaataaaacccctgaacacggacattcacatgcgtttccacttcatggtcgtccccacaagctccccatccggattcacacgcagcatcaggctttcaaggctacagtagcagctgccaaaggctgaacacgtatcagaacctacttccgattctggaattctggtgctgcaaccccatccttcgccatctctaagaacaccgagagactgggaggcgggcttccggagagggatatgggacatttcccaaagtccaggttctggctttgaacattttatatgaggtaacatagctgttttacctcatagagcatattatgtcatttctgatgggagtgaccgtagattattagtggagtgatagacacgcacatcaacagaatagagtcaagaaatggacacaagaacaggcaactgatttttacaaatgttcaaaatcaatttaatggaaagaggacagtgttttcaatactgttgaatcaactgggcaaccataggctgaactttaaattaacccttaccctatatacaaagatgaatttaaatggatattgctaaatattaaaaagcaaaactggctgggcgtggtgtctcacgcctgcaatcccagcactttgggaggctgaggtggccagatcacgaggtcaggagatcaagaccatcttggccaacatggtgaaaccccgtctctactaaaaatacaaaaattagctgagcatgccggtgcgtgcctgtaatcctagctacttgggaggctgaggcaggagaatcacctaaacccaggaggcggaggttgcagtgagccaagatcatgccattgaactccagcctgggtgagagagtgagactctgtctcaaaaaaaaaaaaaaaaaaaaaaaaaaaaagaagcaaaactacattattttgtcaaaggaagtggaaaaagaattatcaattacagtaaggaaggaatacttagatgtaatgccaaaaccccacaatccattaaaaaaaaaaaggctgggtgcaatggctcacacctgtaatcccagcactttgggaggccatggtggacagatcacctgaggtcaggagtttgagcccagtttggccaacacggtgaaaccccaatctctacaaaagtacaaaaattagtgggacatgatggcaggtgcctgtaatcccagctactcgggaggctgaggcagaagaatcacttgaacctgggaggcagaggttgcagtgagccgagatcatgccattgcactccagcctgggcaagacagcaagattccatctcaaaaaaaaaagttggacttcatcataattaaaatctttttctctgagagaaaaaaagaaagaaccacatctatggaaaaatatttgcaagtgatataaaacctttatccagctggataaaatctttatccagcattaataaacaatgctctaagcagcgcacagtggcaaatgcctgcagtcccagctactctggaggctgggacagaaaacttctcaagaccaggagtttgagactgtagtgtgctataatggtgcctgtgaatagccactgcactccagcctgagcaacatagtgagaccttgtctcttaaaaaaaaaaaaaaaaaagcctttagggaggtgcaaatggaaggccacatacaattggtatgtttgtattcataccaatacacacacaatagaataggtaaaataaaacattccagtcctgcgtggtggctcacgcctgtaatcccagcacttcaggaggctgaggcgggtggatcacaaggtcaggagttcgagaccagcctggccaagatgatgaaaccccgtcactactaaaaatacaaaaattagccaggcgcagtggcaggcacctgtaatcccagctactcaggaggctgaagcaggagaatcacttgaaccccggaggcagagggtgcagcaagccaagatcgtgccactgcactctagcctggtcaacagagcaagactacatctcaaaacaaaacaatacaaaacaaaaaaaatactgacagcatcaagtggaagaatgtggagcaactgaacctttctatatattgttggtgagcaatgaaacaccactctggttagtatcttacaaaggtaaacatacacttaccttatgacccatgaatcatactctgcagtaattatcctagagaagtaaaaaattgtgctcacacaaagcctgtgtgtacaaatgttcataggatttttatttgtaacagtaagaaaaaccgggaacaaaactaatgtccttcagtgggtgaataaacaaatagtggtatattcgtatcatagattattagtggccaataaaaacagaacaatgatatgcagaacaacttggatggatttcaggttaatctgctttagttgaaatagccaataccaaaagggtacatgctgtatgattccatttttataacatgctactaatgacaaaactaaagatgaaaagatttctgattgccaagggttagggctgaggagaggttgtgactataaacaaggagcatgagggagtttgcattgatgcaacattctgaatctcgattacggtggtggtgacatgaatcaatatatgtgttaagatttcttaaagctacatataaaaaacaaacaaaaatgcatgcatgttaaaactggtgatttccaaataaattctgtagttaacagtattgtaacaatttcactttcctgtatttggtaatgaactatgcttatgtaagttgttatctttggaagaagctgggttaagggcaagaactctggaatattttggtaagattttgtgaatctaaacttatttcaaaataaaaacttacaaaaacatcttatttatattaatttcataacacctgatgttacttataaacttaaacatattcaagtatggtcaattacacttatgaactgaatatactgtatccagtttcattctgaagtactttagttattctgaaataacacaaacttagaaccaaagaaatgcaggagctaatcatataataaaatgaggcaggcataaaatactccggtattatatacaatattaaattttagttcgtgattagaggaagtcacaatttaaaatgtataaaatcagtgacaaggcaactaggaatatggctcaagctatcctgttcccaaatgcacatgaggcatattatctgttaaggttagaattgtgacagaaagctctcatccatcattttgccaaggcttctttccttcattaaattctctgatattttcctaaaagtcttctacattgaatgttttcataagttttttctgcattatttcctagcacacgatgaggcaaaacattttactgaaaaccctgccacaggggtttgccagaggaaagtatttctccagtgtgaactctctcaatctgttgaagttttatttttgggcaaagacgttcctataattattacatttccacgaattagtagtttattcatgatctatgatcacttctgagggggtttatcttcccaccaaaggcttttatagtctgccacattcataggatttttctcagtatacaatttttagacataatgtcctaaaatattttctcaaatgttttgtacatgttttctctgacacaaaacatgaagtaactgatcactaaataaacaaccatgtagtctgcattcatgaaattactcttctttgcagatatcttaagggcctacatctggcaagaggctttcccaaaatgactacctgtgaattctcctgtgtttaacaaggatagacaagtgcgcaaaagctttcccacaatcactacatccatagggcctctctcctgtatgttttctttgatgaacattgagccctgattttgtagtgaaggctttcccgcagtcactgcatttgtacggtttctctcctgtgtgaattctctgatgtgtaataagatcatttttgcgcaaagagaattttccacattcagtacatgcaaaggaagtctttcctgtgtgaaatcgctgatgttgtatgaggcatgtcttcttcctgaaggttttatcacattcattgcatttgtatggcttctctccagtatgagtttgctgatgtatactgagagtactcttcatggtgaagccctttccacattcattgcatatataaggtttctccccagtatgagttcgctgatgtgcaatgagcatgcttttcccagttaagcctttgccacattcactgcatacatagggtttctctcctgtatgagtgcgccgatgtacattgagatgactcttctcagtgaagccttttccacactcattgcaaatataaggtttctctcctgtatgagttcgttgatgtcccattagccggatctttgctggaaagccttttccacactcaccacatacatagggtttttctccagtatgagttcgctgatgcacaataaggcggctcttcacagtgaagccttttccacaatcattgcatatatatggcttctctgcagtatgagttcgctgatgtacaatgaggtcactcttcatggtgaaaccttttcgacattcggtgcatacatagggtttctctccagtatgtgttcgctgatgtctgatgagtgggctcttcaaagcgaagccctttccacactcattgcatttataaggtttctctccagtatgagttcgttgatgtaccatgagacagtgcttcattgaaaagccttttccacattcactacatgtatataatttctctcctgtatgagtttgctgatgtgtgataagactgttcttcaaggtgaagcctttcccacatttattgcatataaagggtttctcaccagtatgagttcgatgatgtgcagtaagacgcctcttctcaatgaagccttttccacattcactacatatataaggtttttctcctgtatgagttttctgatgtgtagtgagactgaactttgtagagaaggccttcccacatacactgcatccatggggtttctctcctgtatgagttcgttgatgataaatgagccgacacttcttgatgaaggctttcccacattggctacatgtgtaaggtttccctcccatatgagttttctgatgtatattgagctgtgatttcttgaggaaggttttgtcacattcagtgcattcataatgtttcagttctgtatgagttctctgatggtccattagtctggattttctggagaaagctttcccacacatactgcatacatgaggtttttctccagtgtgaactctctgatgatcaataaactgagacaacttgaggaaggctttcccacattcactgcatacatgggcattctctatgttgtgagttctctgttgcttaatgaactgggacttattaataggttttgcaattgcaggaaacttcatttcagtataaaattgtttatggttagcatgaaaaagggatttcccatctctattaaactcagcagagttctttaggccagagctccttttctggttttcaaaacttaaatttgattttaaaggtttttcatgtaagtcaaacgtatcacaatcttgcttcagcaggaaatgacctttgttctgattaacaatatttccaaacatattctgttcatggcactgtttcacactcttctgaatactttgattttgcaagtgatgctgcagaggatcatcaattttcctgatttctaggaaagaagagaacagtcaatcactccatcatcttgttttgaaataaactatttaaactattttttaaaactgccttggtgtgaggtgactctttagtgaaaaccctattttatttatttatttttttgtgagcaataaagctttttaatcacctgggtgcaggcggactgagtccgaaaaaggagtcagaaaagggtgataaggggagggcagttttatagcatttgggtaggtagtggaaaattacagctaaagggggttgaaaaccctattttagtataaaggaaactccatgtataaatatccctcatctcttacacattgggagagatgtgtaagattccttttatctcttacacataaaggaaattccatgtataaatatccttcatttcttacaaataaaacacaataatataaacacaccgaaaagtaaaagcaactgtacaaacaaggctagataattcacaatgtatatagatttggctgctttctaaataggtctttatacaatacacacatagtcaaatataaacaggtcactttttgcagggaaccccaaaatttggcaggataccagaccacagaaataaagagaaatatcagaccacacaggttgatcccaaatgacaaaggctgtattaatttattctacaaatgtttgctgaatgacatctatgtgtaagtcactatgctcatgtttgggatatacaaacaccttcctttttttttttttttttttttgagacagggtctctgtcaccaaggctggagtgcagtggcacaatctcagcttacttgcaactataacctctccctcccaggctcaagtgatcctcccacctcagcctcttgattagctgggaccacaggcatgtgccaccacacccagctaattttttgtatttttggtagagatgggtttttgctgtgttatctaggctggtctcacaagctcaagaagatccacctccctccgcctcccaaagtgctgggattacagacatgagccactgcactcagccaattttcacgaaggtttaattttagttaggaaaaaatgaaatcacaaggaagcaaaaaaataaagaaggtaattgcattttgtgaaatgtggttaatggaacaatggagatataagaggtggagaaaatcaagatatagttaaagaaatgacaaggttcactaataggttcaatgggacgagtgaaagagggttaatggaagtgaggactcaaagattattccaaaaattatatggtttcaggctggatacagtggctcacacctgtagtcccagcactttgggaggacaaagcgggtagatcacatgaggccaggagttcaagaccagcctggccaacatagtgaaactgtgtctctactaaaaatacaaaaattaggcatggtggcacatgcccgtagtcccggctacttgggaggctgaggcacaagaatcgcttgaacccaggaggtggaggttgcagtgggctgaaatcacaccactgcactccagctggggtgacacagcaagactctgtctcaaaaaaaaaaaaaaaaaaaaaaacgcaaaactatatggcttcagccattggataggaagaaaaaacctcatgatgaaaataggaatattactatctggaatgaagggaaaaatttagcatgccttgtgaaacacataaagtttaagaccattaccacatatccaagtacaaacatgaagaaattggttgaatatataaatctcgaaaaggccttatctggaaacagcaatgtagatgacatccaacatttacaaattattcaaagaaagagtactggatgagactttagttggaaacatgtagaaaaaaagaatgaaggcacagggccagggatcttgtcaatccaacatgtagagtttgggaattcgttaagtccactgaaatgaaccatacgctgactattatgatcaggtgcacaagtggagacccaggtgtacaaaacaaacatctaggagtggtaagaatgtaatagcctcttgaaaattgctaaaatagattttaagtgttctcacaaaaaaagtaagtacgtgaggtagtatatacattaatttgttcaatttagccattccacaatgtacacatatttcaaaacaacatgttttacatgataaatatatgtattttttatttaggaattaaaaagtaatcatgtcctggtgtggtggttcatgtctgtaatcccagcactttggtagggtgaggcaaagaggatcacttgagcccagaaatttgagaccagcctgggcaacatagtgagacctttctctataaaaaatacagaaattagctgggtgtggtggcatgtagtcccagctaggctaaagtgggaggatcacttgagcccaggagattgaggctgcagtgagccatgattgtgccactgcactccagcctgggtaacagagtagaaaaataaagaaaagaaatcataaatttaaaaaacagaagaatgtgagatcctcagcatttgatttaaagtgtcacatgctgagtgattatcacattccccaaacttgctattcttcttcattctatgtaccaccattaaactaattttcccaaagcacaatctcaagtttagatgaaaggttctatacttaagactccaactaatgacctaactggatcatactatcccgtgttgctacagaaagagggaacaatgatttgcagcaaagtgttaactcagcaggcctgggctattccatccctacacattccaaagaaagaactcgtcttaactgccttctaaaagataacctctgagcccctggaatattctgcctgctaagggtatcttttaatgcctgaggccttgggtcatatcagatagtttatgctagcaatgtgatttatggtggacacctggttttgcatgtctcaggctttgggccacatttgtattgttttgactctgggtggctacagacactgggcttagatgagcttccctagttggcaataacttcacatgtgttgacaaacactgttgcagggaaaattcagcactttgtgcaactccactagaacaggagaactgaaagcttgcacccagtttctcctggattcttctttctatactttttatctttgatgattttaatttgtattatttcactgtcacaaactgtaatcatgagtgtagcagttccctctcctccccattaacgtctaccttctacgtagcaggcaaagtaatctatcaaataaattagttatatcatgtcacttctctactcaaaactccctactgtgttctcaactcatttggaataaaatcaaggtcatgaatgcccttgacaggcagtatgtgacctctgtaccaaaacttccaactatgcccccactgttcttatttccagacagttttgcttttgctcactctactctatccattcaagcttcctagaagttcctcaaacacactccagggtcatttttcaacttctcattgtctcacacctggaacactcttcatccagggagcctacacgtgttcatcatctatctgctcaaaggcaccttaacaaagagctgttcccaccctacaagcacagtgccaactcctaacacttactgttccaccagctgctttaactttccttatagcaatttttactccaagatatgttatttatatatctgcttattactggttatatggttacttctaagagaacaaaagcattgtgaagaataaggacatggtatgttttttctttcttatttgtactgctgatagcgttggaatatagtaggctatcaaaacacaagttttgggtgtgtggtggaggcaggggggtttgtcatccagcctggagtgcagtggcatgaacttggctcattgcaatgtctgcctccagggttcaggcgattctcccacctcagcctcctgagtagctgggattataggcacataccaccacacccggctaatttttgtatttttagtagaaacggggtttcaccatgttggccaggctggtctcgaactcctgaactcaagtgatccatctgccttggcctcccaaaatgctgggattacaggcatgagccaccgcgcccagcccaaaacacaagttttaaaggaaggaatcatatgacaagaaacatgattaactgggactaggtgtcatcaaaatatgatagaaaagtaattaatgttatttctatattctagcaatgaataatctgaaaatgtaatcaagaaaacaattccattaactgcagaaacaaaaagaaaactatacttaggaatatacttagcaaaggaagtaccaaatttatattctgaaagtgataatgcattgtcgaaagaagtcaaagacctaacaggatataaaactgtccagtgttcatggatcagaatacttaatatgatgaaaatgggaatactccccaaaattgttacacagactcagtgcagtacctaccaaaatcctagccactctttttgtagaaatttacaactgattctaaacttcaaatggaaattcaaaggactcagaatagtcaaaacaaccttcaaagcaaagaacaaagatggaggactcacacttcccaatttcaaaacttactatagaaccataatcatcaagactatttgataatatatatttatacatagtatatgttccaaaattgattgtggtatggttacacaactaggtgaatagattaaaaaccactggcttatacaccttaaatgggtgaaatcatgtgatatgtgcattgtatctcaataatagtttacaaatatgatgaaaaaagcaaaagctatacagaaatgaatgcagtcaaaacatctaacatgaattaaagaaagttcagaattagcaaaactatgaaggaagtaatttgcagcaggcataaatgtctgatggtttgggctagaaataatatacgatattaaaagatcttttctaattaatcaaaacattatcttaaagtagagaactttaagagagttcagcatgtagaaaacacttaaggtaatgccagaatttaagatgtgcagtaatgaaagagaccctggatttaaacaggacagcctgcagcacgattcacaacagcaaagacatggaatcaacctaggttcccatcaatggtgaacaggataactgtggtatatatacaccatggaatactacaaagccataaaaaagaactaaagcatgtcatttgcagcaacatggatgcagctggaagccattaccctaagtgaaataactcagaaacagaaaaccaaatactgtgtattctcacttgtaggcaagagctaaacattgggaacacagggacatcaagacaggaacaatagacactggggactccaagaggaagaagggaggaaggcaagggttgaagaaccacctatttggtactatgttcactacttgggtgacaggattgagcttctagtgaatcctcggcatcaggcaatatatccatgagacaaacctgcatatgcacctcctgatgcacctcctgaatctaaaataaaaacataaaagataaaataaaattaaaaaaataaaattatataaggatagccaaaagcattattcttagagggaagatgattcttgttcctcatacacaaaatgggaagttacaggctagttgtcatgaagacaagtaaaatacatggaaataaagtatacattagataatattaaggcagaagttaatttggtagtctcttccagagaatgaagagttaattcacgggaatgaaaaaaacttttaaaagttatgagaacagtaaagaaaatggaagaaggatgggctgggcacggaggctcacgctgtaatcccagcactttgggaggccaaggctgacagattacttgagccaaggagttcaagaccagcctaggcaacatgacaaaaccccacctctataagaaatacaaaaatcagctgagcatggtgatgtgtgcctgtagtcccagccacttaagaggctgaggtgggaggatcgcttgagccgaggaggtcaaggctacagtgagcctgggtgacagatgagaccttctttccaaaaaaaaaaagtatggagaaactcaggattcagtataagaggaataagagaacttaagaaacacataaatgccaatcagagaccaggttatcatgggcacagcatccagagtggagaaaatgagggaaaataatgattcccagagtgggaataatgaaggaaaattattattttcctactagggcaggaagatgcagtagtcagaaaaaagtaatgagttcaaaggtctctctttccggagaggcctggaaaatggaatttcatagcaagagaggtaatacacaagcagagacactgtgacagtggacaagaaaaggcagatttgaaaatcctaagaagataattatgtagacaaaaacaagatgtgcataaaataaacaaagatgaaatctcaaggaaaaaaagtgggggccgggcgcagtggctcaagcctgtaatctcagcactttgggaggccaaggtgggcagatcacaaggtcaagagatcaagaccatcctggccaatatggtgaaaccccgtttctactaaaaatacaaaaattagctgggcgtggtggtacgcacctgtagtcccagctactcaggaggctgaggcaggagaatcccttgaacccgggaggcggaggttgcagtgagccaagattgcgctactgctctccagcctggtgacagagcaagactccatctcaaaaaaaaaaaaaaaaaaagaaaagaaagtggggcatattttccatactataacaaaaaagagctcttccttgggaagaaggagtgatggaggggctgttgctgtgtcctcagatgccctcactgctttgacgcctgctctgtgtgggcagaacatggtgtctgtggctgtccacctggctgctcctctcactcaccagaacagattcgagagtagatttcatcttctgttgtgcaagtttcttctcctcgttccaatttggagagtgcatctggtttgctggcttgataccctgttcatgggaaatgacagaagatttagacaaatcaaacggggctggcaatattgaaaaaggagagttacattttaaggactacataggtatcagatctgtaacaagaaggtagattatactctcttgtgtggggcaagagaatgatgtgagaatctaccacttcagagtactgcaggtaagcagctgagaaaggaaggccactgactgggcaccctctgagtgacacagggcagctgtcctcacccactgccaccaggttgctgtagttctccaacatcacgtcccggtacaggtccttctgagcagggctcaggaactgccactcctcccaggtgaagtccacagccacatcctccagtgttagggattcctgtaataacacacttctgtttaatgaagtcatattcttttggtgataggaaaagaatgtcaaggaagtcattccgctcattttcaccacataggaagctggtggggtttttttcttagtacattttgacagaataagaattccagtaaaatattctgtaactgtgcggtcatccattcattcaacaatgttgaaaagtcaaagaaatgtctgtaatacacagctatccaatcctcttgctaatgaaagaacatctataacatgtagcatctatttcccaataccaaactagtcataagtatatgccagttacaagtagacgaataattcagattcttaaattcactatgagctttcaggccaatatcaaactctgtaatgaagacatggcagatgctagtatcacaagacaatgcattctaaataactatggttaacatagttaaccatattattattttattctgaatgaaataaaagagactatataaaacatgtataaagcacaaagattattagatgattaaacaaatctgtttttttgcttgcttgtttttttttttgagatggagtcttgctctgttgcccaggctggagtgcagtggcacaatctcggctcactgcaacttctgcctcccgggttcaagcaattctcctgcctcagcctccctagtagctgggattacaggcgcacgccaccacacctggctaatttttgtatttttagtagagatgaggtttcaccacgttggccaggctggtctcacactcctgacctcaggtgatccacccgccttggccttccaaagtgctgggattacaggtgtgagccacagcgcctggccatgattaagcaaatttggaaaaaaaaatccttagaatatatatgcagacacatgtatgcacacagacaaattcatatatatgtgtatgttattagacagcgttaataacattaaatacaatgaagaaacagctaaaagaaatctacttttgcatttatgagaaggctacagttaagaacaccacctaccataacacctccgtgaagaactatcaaagatgtatttgagcctcagaattataagccatgaaacattaacatccctcaagaaactggtctgctttctcacagttgatataacttatcatgtttctcttgtatagcttgtcagagatactagaggcaagtttacagcaaatgtaacctacggggtcccacacagtcacaaattccaacatgaatcatgtagtatgaatcctatgaataatatatccctgatccttctttgcccagatttctccaggtcctgatatttccaatttatacttttctgattaattaccctgatttttacaggactttaaaaatacattggagaataaaggaaagaataaaacaaaccaaaagtcacctgggcctgcatcattgtctcctaaatttgggaaatgactgctaacttggacgttctgtatttgtctcttctgaatcagctctaaatttcggttcaaaaacttcaatctccaatcaaggatgtccccagaaatgatgacacccaagtcttggaaactccgcctccttccttcacttgatttctcttgttctcagcacctgtgggctgaagagcaaattactctgagtggtacattctttttaggcccagatgttgtcactgttcctatatgctcaccttaaatcaaggcccccaaatatctctctgttcttttatttagtgctccagaagcttttatatctgggctagtaaaatataacattctgaatatatgggaggtacagcacccttctatataaagttgacgtggtatgactactgctagtaagtgaaagagaatgtggggaaaagaatcgtcacaacgtgatgcccagcagctgggcaatcctcaggcagaccagttttaggaaagaggtcacatagacagttaagatgcacacattttttctttaaaaccatgtgtacccatctaccttttcagaggtctttttacattctaggatactgcaatctgagaacactgtcctaagcaaataataagcactatcttatttaaattattcattaccatccacatctttgactttttttcttttttttttgagactgagtttcactcactctgttgcccaggctggagtgagtaagactccagtggcgtgatctctgttcactgcaacctccatctcctgggttcaagcgattctcctgcttcagccgcctgagaagctgggattacaggtgaacgccacatgcgctgctaatttttgtacttttagtagaaacggggtttcaccatgttggccaggctggtcttgaactcctgagctcaactgatccacccatctcagcctcccaaagtgctgggactacaggcatgagccactgcacccggccgccatccacatcttgatacttgcaaagtattctaagtataaatgtataaaggatactcagcaaaaatatccttgaggaattacatattacagcaaatcctaacggatattcttcaagcaaaagaaagatgactccagtgtaagcagaggagcaaggtctgaagaggaacaaaacggtaagtaattaataaagcctaaatcagtattgactggaaaaataatactgataataatatatcaggaagttttaatatatatagtgttaaaatattccataagaacatataggccgggtgcggtggctcacgcctgtaatcccaacactttgggaggccgaggtgggcagatcacgaggtcaggagttcgagatcagcctgaccaacatggtgaaaccccgtctctactaaaaatacaaaaattagctgggcatggtagcgcgtgcctataatcccagctactcaggaggctgaggcaggagaattgcttgaacccaggaagcggagggtgcagtgagccaagattgtgccattgcactccagcctgggtgacagagtgagattctatctcaaaacaacaacaacaaaaaagaacatataaagtaggaggatggcaaatgaaaacgtattttaagatatctgcatagcagaagagtataaaatactaattaccataacattaacaaataagtttatatgttgtttgtaatcaatagtgtcagcaataaaactaatttttaaaaaattatttccatgttaaaagagaggtctatggtttccgtggcagctactcaactctactgttgtagctcaaaaatgcccacatacaaaaaaatagacaaatgattgtggccaggtcccaacaaaactttattaacagaaacaggtgctgggagatttagtccatgggctctagttgcccaactgtgaatttgtgcagaaaagccatatggtcacctaaatcaagagtcagtaatatagtatccaggacctggaccacctgttttgtaaataaagtcttataagaacacagctacatgcattccatgacatttcatctcaggctattatcacattacaatggcagagttgagaatttgggtctagaatgtcactcagtagaatgcagtataaaaaaataatcaaagatgacttttgaatataaggggcaaattatcagtatttgcctaatacgtctgtattcctttagtcaggtggctggatacaaaatttaaatagaaaaatcctatatcctcctaaagcatatacagatcgagtcagtattaagagcagaacctttcttgggaacaatttaacattctattgaaaattgccaataaaggtatacctggtaacccaaaaccccattcctaaaactttcttaaaaggtaatattggcaaaagtgtgctatctgacaggtcatttttactttcttcacttgatttttcatagggaaaacacaggtttacatcagaaaaatattagcattctacatttaaaataaaattgctgatggtagttcagtaatataagtttacggctttaaatgttttcattaatagaaaaaagagagaaaccaggcgggaggaagggagagaaaaaaatgaatataaatacaaattttacaaaagacaaaaccaaaaataatcctcagagataatcgtgaggaaaagatgtttaactcctcttttggccaacaagtaaagcgacacaagttatgccaatcacacaatgagcaagaagcagaatcagggctgaaaatccacttttgtttcacttcaaaatccacttttactctactttataccgaaccaaaattatctgtaaatcagatgcctccctattaagtaaataaataaagcaattaaagggctattagtagaattctagttaatcatatacagaattatttagaggaatggtacttatgtctgtaacttactttgaaatataccaaaatcgacaacaaataaggaatgattcacaaacagaggaatggatgaatacttagaaaaccagtagagctgatctaatacaatgttaatggtaaaagctaggtggtaggcatattggtattaacattaaacttctttcaatatttccataggttcaaaaattttcacaaaataatatgttaggcagagagaaaaatattgtaatactaagaattaagatgaccaaatataaaataaatatttaaaattaatttatcttttgttatagattataaggaaaggggagtcagaaagcaatacactgcaataaaagtaatagtctagattgaagattaaaggcaggaaaaacaaaattcatggataaatggataatcataaaatgttcctaaaaataatacctaaacattttaaaacatttcacttctatccaaatgtacgcataaacttaatgtgaatgcacttatagtaccaccggctcaaacagtaaaaacaacttctaaatgtttattacataatataaagcgaaaaagataatagtaccatttacataatttatctgaattatgaatattaagcacataacatacacgtctaaaattgaaatattctgaaaatttgacaaaggttatctttgagtaaccgagcttaccatggcagagatgttatcttacttgtgtcagaaagaacctgaaaagaaatatccaagaggatacgctggaaacttgcaggacaaagggtagaagccgcatcttaaatataaaacatactacttttaggtatgctagatgactgatctcgccaaaaacttccatttctgaggattcaagaccaaggggtgatggaaggtgccaaaggggatttaaaaaccagtcgtggagaagggtcttgggcagaaggggaatgctaatgagcatcaattctgttccagcagccagggctggggctaacccatcacctgccatggttcccaggcctccagagctgcagcccacatcggaatctgtggcgctaccaccaccgccaccgggattaattccaaaacctggatcagaaacctccgtaccttaacccccaagacagttcctcaatcatttagtcccaaacaaaacctgaaccataaaccgattcgctgacaaaacaaaccctccagttcgcaatcactgagccccgccaaaggacaacaccaaagacaccagaatgtgacttgggcactcagtagcggatctctagagatctttaaccacaaactacacgaggaccctgtgactggtcccagaggtaccccgatcacacacacacacaccctatcacggacctcttgtagttcccctgcgataggaatcggacccacgctaagctcctgaaagaattccactggcgtcgccaaacgctggcgccgacagataccagtccatcaccactgtccacgaacacgcccagccacggacagaatttcctcccccgtcaccacagcgaccacccagtgactgaacttacttcccagaacttggtgggctccggcctcatctctcggcctcctcagtgcctgacggcgactatccagggtcggaggcgttcccagcgtttgcgcagatgcaagatggccgcgccctcgtcgccttggctccatgggggccgccatctttgagtatctgacgtacacaaggcaaagggcgcgttttggcgctggtgaccgggggtgaccgggggtgaccggggatggccgggaagatgaaagagcactgaaactgtcccatttcctggcacctcaacccttcataaatacgggtccatatacagaggctccagtttacacaagacaaaaatggcgtggaggtaaatccctttcagcagctgaatagaaggctaagatggccgcgacgtttacactttgtacaaaggttaggaaacagttccttgtgagggaaaaggagaaccggccgagaggggacacttcggccaaagccagatttctaacaaagtagcttgaagcgccttttgaacgcagaagagggctgttagctacgctgacggaacaggggtagcagtcacagactaggtaatgaaaacggttggaacgtgccaaaattatgttgggtgaaaggcatggggaaaagccagtaaaagccagaaagtatagttcccaaggcggaggggagagcctgggacccaggtggagccaaatatgagggctggactcaggagaagtggccagaaattaagggaacaggaccacttcagtgagaaaaaaaaggttgggaaagaggccgggcgcggtggctcacgcctgtaatcccagcactttgggaggccgaggtgggcggatcacctgagagcgggagttcgagaccagcctgaccaacatggagaaaccctgtctctactaaaaatacaaaattagccaggcatggtggcgcatgcctgtaatcccagctactcgggaggctgaggcaggagaatcgcttgaacccgggaggcggaggttgctgtgggccaagatggcgtcattgcactccagcctgggcaacaggagcaaaactccatctcaaaaaaaaaacaaaagaaagaaaggttaagaaggagatcacgttatactacgtgtgccaaccgcgaatagtatgtgcaaagtcatggcaatgctgaactgtaaatataaatccaaccaaacttcctatattagaagaatgagagaaaggaaatgcctgtgtgaatctatgtgtgtgatataggtatcagtatataaatatacagagaaattgtcaaactatttttcagagtcaagttcgtgttccatttgctcttctcacccttggtatatgagagtttttctttttttttgttttttttttgtctctttttgaggcaaggtccactctgttgcccagtctggagtgcctggggagatcacagctcactgtaacttggaactcctgggctcctgaatagctgggactacaggtgggcaccaccacacctggctaattttttaattttctgtagagacaagggtctcactatgatgcccagctggtcttgaactggcctcaagcagtcctcccacttcatcctccaaaagtgctgggattacaggtgtgagccacttcacccttcacccggcctataaagagatctgaaaagaaataagaaaaaagatgggcgcggtggctcatgcctgtaatcctaacactttgggaggccaaagcgggaggattgcctgagttcaggagtttgagatcagcctggccaacatggcgaaaccccatagctactaaaatacaaaaaaaattagctgggcatggtgtctcaggcctgtagtcccatttacttggaaggctgaggcacgagaatcgcttgaacccaggaggcagaggttgcagtgagccaagatcatgccactgcaccccagcctgagagacagagtgagactcttgtctcaaaaaaaaaaataaataaaaataaggaaaagatgatcaacttaaaagctccctaaaattttctataaatacatgaaggaaataaacaggacactttttttaatgtaaatgatcctaaacaatttaaaaaataccagttttactaatattcaaacaaatgcaaagtaaacgtgaaatataaatgttttaacccttattaagatttgtaaagattgaatgacaaatcatatttagattataaggccatggaacaaaggcattctgttatgctaagcctctttaagtcttctttttctgcatggtaggtaataatgttgtcaattacatactgctttaaatgaattgagatattatcatactggtcataattcgaagttcttaagcattacattatttctaggtataggattgtgtttctatataaattcgtaaaatgtttttgtagtacagtctgttattacccagtttaaacttttccttctccttgagccatgaattttaagaattgattcaatagaacttttctttgtgagaacaaatatgtgcaaggatatttatggtattgatctgacaattataaggaaacaaatacttttgtggttattgcataaatttattcttgcatctctatattcacatctttggatagtattctccatagtgactgactaatgtgtccaataggacagtagcaagtgtaacacaaatggaggtgagaaataagcttgctcatcaaggcttgcttgtctcttagagatcttccaacacattgtaagaaagcccagactagcctcttgttgactgtgtaaataaaggcctcatccattccagcagaagcccaaatatgtgaaaaaagctatttagaccatgcagccccagtcaaaatccaaccactagagcctccggcccagcagtcccaattgttactaaactctgtggacaaacataatgccatgagtgggtgggggtcacctaatctgccatccaagtgcttatccctgctcctagccaagcaggacttgccagcttgggtggtgtccaagtagggaggggccctcactcttggatcaccataagagttgagacagctgggtctgcaggacattggaaaagtcgggtgtgccttcctctgtagggccacctgggaaggatacagctgtctgcaaaccatgatgtctgcctgagggagccccatgagcagaggatgcccaaggccttgggaacccacgccttgcactagatttaatgactaccctgctgggttttgaacttgcatggaacctatagccctttcttgtggctttctcccttttggaatgggaatgtttacccaacgtctatgcccccattgtatcttggaagcaaataactttttattttacaggctcataggtagaagagacttgccttgtctcagataagactttggacttttgagttaatgctggaatgagttaagactttggggactcttaggaaggcatgatggtattttacaatgtgaggacatgagatttgttggggagggagaccaggggctgaatgatatagtttggatatttgtccctgtccaaatctcatgttgaaatgtaattcccaatgtcagccgggcgtggtggctcacacctgtaatctcagcactttgggaggccgaggcaggtggatcacaagaccaggagatagagaccatcctggctaacatggtgaaaccctgtctctactaaaaatacaaaaaaaaaattagctgggcatggtggcgggcgcctgtagtcccagccactcgggaggctgaggcaggagaatggtgtgaacccaggaggcagagcttgcagtgagccgagatcgtcccactgcactccagcctgggagacagagcgagactccatctcaaaaaaaaaaaaaaaaaaaggaaatgtaatccccaatgttgaaggtggggcctggtgggaggtgtctcagtcatgggggcagatccctcatggcttgatgctgcccttgcaatagtgagtgagtactagcaagatctagctatttgagtgtgcagcacctaccccctccactctgtcttactcctgctccctcttcaccttccaccatgattgtaagcttcctgaggcctccccaggaccagatgccagtgctatgcttcctgtacagcctgtagaatcataagccaattaaacctcttttcttataaattatccagcctcaagtatttatttatagcaatgcaagaatggcctaaaacatgctgtctctacaaaaaaaaaaaaaaaaaaaaaaaaagccaggcatgagggtgcacacacatagtcccacctacatgggaggctgacgcaggaggaacacttgaacccaggagtttgaggctgcagtgagctataatcgcaccactgcactccagcctaggcaacagagactcttttttttgttgtttttgtttgtttttcagacagagcctattccgttgcccaggcctggagtgcagtggcaggatctcagctcactgcaacctctgcctcccaggttcaagtgattcctgcctcagcctcacaagtaattgggattacaggcgccaactgtagagcgcccgatcctgtcactgtttggggcgccactacgtaacccacaaggacctagggggactgaaaaaagtgggggaaacgggaataaaagagacaaaagagtatatttggaagaagggatcaggggacaccttgcctctagtggacaagggccctgagctttacacagccctccatatttattaggcaaaagagatagtgagaaggcgggtggaagaaggggtcagctactcagtccagagtagggtttgcaagatggcattctctagatgtcccagtagataacctcaaggagctcagcaccaggaagcgattgccctcagcaaaccttctggcagcggaagcagtcatgagtttgcccacatcgtgcattcatgataaagtttgctgtttgatcatatagcctccagtggaatgctgagttggtcacatcccatgggccttcggctcccaacagcccagcaccatacccagctaattttttgtgtgtatttttagtagacacagggtttcgccacgttggccaggctggtcttgaacttctgacctcaagtgatccgcctgcctcggcctctcaagagaccctgtctcttaaaaaagaaaaaaaagaggttaagattgtaaatcctaaaaaaaaaaaagcaaaagcaaaagctgtatgtagatttcacagcatctttatttatagcacttaaaaccaggaaaacagtgcaaatatatctcataggtgaatggataaactactacatcaaatatgtatactactctcaaatataaacaactttcatctggttagatacatggtggtaaaaaaaaataataaaacaactattcatcaactcatataaaccttaggagtaatttgctgagtgacaaaaatgccaaaagcttacatactctctatcaataaaaattcatataacttatttatataaaatttataaaaaccatttacaaaaacaattttatttttatcatattcatgaaatgatgaaattatactgataggagaaaagtggttggcagagttaggtttggatggagtgtaagcataaaaaggtagcatgagggactttgtgttcattagttttatgtggttgcagtggttacacgaatctgtacatgtaatacaacttcttagagtacaaactaaaaaagaaaaaaacatgtaaaaattcgtcaaatccaaaataagattagtactttatagtatcctaccaatgttgtttttctggttttgataattatggttatataggatatttttactagaaattggttgaaggatactagcaaagcctctagactgcttttgcaatttcgagttcaaatttatttaagttgaaggtggttttataaactgatcatctctataatcttagttaagcaagtccaaatatgttgttaatatatttaacatattcagtttcttttctacttaagtttgcttaatgtacaattaagctcagagccaaagaaaggaaaagagctaatcataatatggggtggttgttctggagtattttctgacacaaataaattctctaattctcccacaccaattgggtgttctacaattcaattctgaacaactgggtgttctataattcaattctgacactaacttctccaagttagtgcagactccacaagttagtgcagtccaagttagtgcagtgcaagttagttagtgcagtctaaattagtgcagactccacaagttaaggggctcagtccaagacttcccccacatcagatgccactcacaaggacaacctgcagttctgaatggtgataaattccgagttcccactgccctactcaggtttgataatttgctacagggctcacaaaactcaagaaaacagcgtactttgttttactggttataaaggacgcaaatgaacactcaaatgaagaggtacatagagtaaagcctaaaaagggttctcctaatctcaggagcctctacccctatgaagttgggggtgcaccaccctcttgggctatttggagttctcttaatctcattgtctaatctaatctccagcacccctccccttccaggaggtgggagaaatggggcacaaagtctccatcctctagttacttgatcttcctagagaacagccccattctgaggctgtctaggggagcaaccataagtcacttcagtagtataatcaggtgtaattaaaagggcagtgctatgaataacaacaacagcaaaaacaaaacaaaaccaaaaaactcttatcactcatgaaattctaagcgttttaggagctctatgccaggaaccaggaacaaagaccaaatgtatttctcattataccacaattttacacaacagtaaaaataaacagtaatgagacagtatattatggaatcattggcaaggcaactagaaatgaggattaaggtatcctgactgaaaatgcacaccaggtgtattagctgatgtttaaggttatacttattaagaaaaagcactcaaatattcatcattttcaccacatttcatgccttcatgagctgttgatagtttgctaaaggtgttccacatttatttgatagcatgttcggaacaattttactttctatgtgatctcctgacaaatgatgaagcagagtgcgtcgctgaaatcctgccatcaatactgtcaccttaaagttattttccagtgtaaactttgacactcactgaggtcatatttctgagtaaagactttgtcatggtcatcatgtttctatcaacaataagctcacttacgttgaaatctatgatgaaacctgataataaagtctatctttccacagaagacttttcttagtctttgtattcacagaatttatctctgtatacttttcagacatatgagcagaaattattgctcaaaacatctccacattaatatagtttattcaacgtattttcattgacagaaaatatgaggtaaaagaccactaaaggcactaccttatttactgtattcatcaaattgatctctagggcaaattatttcacctcctgaggacagacacacatctgtcaacaggcagcaccatgtttatgttccaattggctagaaacacactgatgtttaatgaagtctgagttgccacaaaaggcatttccatagtcacggcactagtagggttttcttctgcatgagttcacttataaggaaggagctgtgactctccattacaggagttttcaacttgactgattctacccatttctcttgtgtgcattttcttatgtttgacaaggtttgataagtgggagaaggctttctcacaatcactgcatccatacggcctctctcctgtatgcgttctttgatgtacattgagtactgactttgtggtgaaggcttttccacattcattgcactcataaggtttctctcctgtgtgaattctctgatgggtaatgaggccatatttgtgtgaataggattttccgcactcggtacatacaaagggagtctttcctgtatgacatctctcatgttgtatgaggcatattttctggctgaaggctttaccacattcattgcattcatagggtttttctcctgtatgagttcgctgatgtataataagagtgcgctttgtggtgaagcctttaccacattcattgcatatgtaagatttctctcctgtatgagttcgctgatgtataacgagagtgcgtttgacagtgaagccttttccacattcgctgcatatgtaagatttttctcctgtgtgggagcgctgatgtacaatgagattgctcttcacggtaaagccttttccacattcactgcacatatagggtttctctccagtatgagttcgctgatgtacaacaagatagcgcttcatggtgaagccttttccacattcactgcatatatagggtttctcccctgtatgagttcgctgatgtacaatgagattgctcttcacagtgaaaccttttccacattctttgcacacataaggtttctctccactatgagttcgctgatgagcaattagatagcgcttcattgtaaagccctttccacactcactgcacatataggatttctcttctgtatgggtttgttgatgtgtaatgagactactcttcacagtagagccttttctatattcattgggtatacagattttgtctgttgtattagttttcagatgcttagtgaacaggacacttctggataatttctcacattgaccacttccaggattctcttgtatacaaatgttctcatggtaaatgagctgagacttcctaaggaaggtttgctcacattcaatgcatgcatggggtttctcaattttctgagtcctctgatgcttgaagacttggaatttagtatggatacattttgcattttcagaaaatctagttttagtatgcgtacgttcatgcttaccatgtagaagtgttttctcacctccaataaactcaacagggttatttattccatgtcttctcttctggttgattaaacttaaacttgatttcaaattttttctgtacaagtcaaatgtatcatgattttgcactataggaaaatgtgtcttgctgagatgtacaatatttctaagtgtattctgtccattgcattgctgcacgctcttcagaagtctttggtttggagagtgctcttgcagatgactgtcaactttcccgattcctaagaaagaacagagtaacaaattcttccatgagaattgtatgagataaaaatgcttatgaggccgggcacggtggctcatgcctgcaatcccagcacttggggaggctgaggcgggcagatcacgaggtcaggagttcaagaccagcctgaccaatgtggtgaaaccccgtctctactaaaattacaaaattagccgggcgtggtggcacatgcctgtaatcccagctattcaggaggctgaggcaggagaatcacttgatcccaggaggacgaggttgcagcaagccgagattgggccattgcactccagcctgggtgatagagcgagactcagtctaaaaaaaaaaaaaaaaaatcttagcttatgagatgatttgctgggggctggctctttattgtcaactctacgatcccagtataaaaggaaattatgaagatataagctgaaatatatccaagaaatcagatccaagaaaagacaaaaagtctttaaagctataacagcattaaaaaagttatcagatggggagatgaatatatagtggagctgcttaggtaccctcagatacttcatatatgtgacacctttccttaatgactacaataagactcctatagccactgtccttgctggttctcacttacctggacaatttttattctgaattttagcatctgttgtccatggttcttgtccatgtgccaacttggagagtacatctggtttgctagtttgataccctgttcatgaggaaagacaaacacaaacatcctgaattggagtccagtatgtcaagatggaaaaataatacattcgatgaagaaaacaatttcaaagtaagcattctgtcttagaagagattataccactttggggtcagagaggggactgaaaatgtaactcttccaaacaccacagtgactgtaaagctttgattaggtgagcataggacggtgtctgggcattgtaggcacctctaggtgacacagggaaactattcttacccagtgatactaggtggttatagttctccaccatcacatcccggtacaggttcttctgagcagtgtccaggagctgccactcctcccagctgaattccacagccacatcctccagggtcagtgattcctgtaattacaaagtcctattcaatatgatataaactcctattgttaatatagaagtataagataattttttaaaaattttcacaatacagcctgcatctatattcctttctcaaatatactttggtaggagcaaaatcctctatctatacattttagcgcctatttctaaatattaaacgtaggcaaatgacatcaggacaaataaaacatccctacattaccaatgacttcacaaccaatataaggatctgtcatgaatagacttcacatcttgaattcataaaatagtgcttttaaataaatgtaagagaaaagatgaaactatatctgtataaagcacaaaaggcccctaaagttgattagatttttatttattttttaatttttaaagagagatggtcttgctctgtagccccaaatggagtgcagtgtcacagtaatagctcaatgcaaccttgaactcctaagctcaagcgaccttcccacctcagcctctcaagtaactaggactacaggtggatgctactaccaatttttgtagtgacagggtcttgttatgttgaccaggctggtcttgaagtcctggcctcaagagatcctcctgcctcggccttccaaagtgctgggattacaggtgtgtgccactgcgcccagcaaaaaaaaacttctaacagaaaaacatatatacatatgtgtattaatggacagattaacagcatattagatacattgaagattattggtgaattggaatatataagtggaaatggcagaaaatgcagtacagagaaaaaagataaatcataacaaagaagttaataaatatgaaatacagagttgcaagacctagtgtatgcccacttatggtttctaaaagggaaaatagtgtaatagagaagcaatatctattaataaatatccaaaacctaaaatatttcagaactaaatacctcaaatctcaaattcagaaatcccaacaagttcagagcaggaagtcacaactggtgtgacacatcagactgaaactaccatacatcaaatgcaaagggaaaactatagaatcatcaagagacaaaagacagattacctacaaagaaataacaaaatatactgatggctgacatttcaataatagaatccagaaacgtatggaatacaatcttcaaagtcctaattcttgcaacaaaaaaggccaattttggaaggccatttgggattaaaacacatggctagcagatgacttgctgtcttacaaccatgatatcaaggacctgtttgtcaactaaactgtcattctcctgcttcacaataacttttcagagaactgcagagtgtgaagtagaggtaactaagatccaaggaaatactgataagagaatctatgctatattactgtgtgggatgctgcatagtcaagaaagtagactcatgagagtgcgcaagtgctcaagcctggtcagtttatctcattccaaaatctttatgtgagatgtctatcgactgggtaagtgtaaagttaaatttctacctcactccacagtccaaaagaatttattactggatggaaatcttgcaggccaactctaaggtgtcctctgataatctcattctctagctgcagtgacttctgacatcaactacctgggttaggccaaacttcccaggttaaaagcacaatcctccacaagactgccctcacttcagacacaagctgcaagcttaaggctacacagaccaccctcaactccagcgagctggctacaaatgtgtggagctaccatgactccctcaggtttaataacttgatagaacaactcagagaacccaagaaagtgctgtgtttacaattagcactttactattgcaaaatgacacaaatcagaatcagctaaaggaaaatatgcacagggtgaggtctgggaaggttccaaacacaaagctgctgactgtcctctcctcatggaatccttggtggcattacatcttcctgactacattgtgtaacaatattcaagagtacttgccagccagcgaggcgcacctaaactttgatgtccagagattttattgagacttcatgatgtaggcacagtttattgaagcattgcccatgtagctgagttcagtctccagttccctccccttcctgactggtattacatggctcaaagccacaactctctaatcacttagtgcgctttttggcatgggcagcccctatccagagtcatgtcattgccataaattatctagggatctactatgagtcaccactatacatatagatataaactatcaaatatgagtggcccaccatgaatgacagagacactcataacttgggtaattacaagggtttagaggttacctcccaggaacgaaaacaaaggctagccaaattctttattacactctaggtgttcctgcccctgtgcagtaccatcctcctgagtatgaagtggcctaaaagcttgtttctaaagaaaagaatacagcaaaagtgacaagatgccactttaagattacactctatatgacttccatcttgctagcagaatctgtcattttctagctttgattaaacaatttggcacataggggaggtgcatgtgacaaaaaactaaaagtgggctttgacaaacagacaggtagaaactgaggacctcaactaaactacctcatttctcattctggaaatgaatcctcccaacaaccacataagtgagcttagaactgcatctttccccatttcagccttcagatcagattccaacccagctaacaccttgacgacaacccccatgagagactgtgaatcaaagtagccaggtaagccatgcccttattcctgagccacagaaagtgtgagatttttttttttaagtgttgtttcaagtcactaccttttggagtaatttcttaggtattaatagacaatgaatataagatgtaaacttaagaagaacttatgaggccaggagtggggcacacatctgtaattacagtacttccagaggagagtttgagcccaggagtttgagaccaacctgagcaacatagtgagactctgtctctattctctacaaagaacaaaaaattagctgggtgtggtagtggatgcctgtggtctcagctattcaggaggctaaggcaggcagatggtggttgaggctgcagtgagccataattgtgctactgcactccatcctggggaagagggcgagtccctgtctcaaataaagaaaaaaaaaaaaggaataaatgaaaacatgttcatgatataagtaaaaagctttaaaaaaaatgacttctgcatgggaaaaaatattttgaacaagctaaaagagaagtaagactctagaaaaatatttgcaacatataaaagaatcaatatccagtcaagataaacaattataaatcagtaagaccacaaaaaaattaaatgaacaaagactaaagacactttatgacagaataaataatccaaagaaacaacaaagagatgagaaggatctgaacctcactggtgaatgggaaaatgcaaaataaggcaaaataatactggatcatctagatcatggaaaatacacaatttgataacatagtaagtgttggcaagatttgcagcactgaatgtttttgtgcagtgttttccaacactaacaaccaattctccaattatctaaacataaactagatgtccaacaattcaattcaattctgacactatctttgtcagaatccacagatttaagggttcaatcctacaagactgcctcctcttgagttcctctgcccggccgccccactgtctgggaagtgagaagcgcctctgcctagccgcccaccatctgggaagtgaggagcacctctgcccggccgccccacaccaccgccgccatctgggaagtgaggagtgcctctgcctggcccccgcaacgtctgggaagtgaggagcgcctttgcgcggctgctgtgcgaccctccaagtgtgaagtgacagccttgtgtgtgatctttctgccctccccaagtttgcattttcgacattaaagtttacttttcaattaaaatttttaaattggagaatatataatttaaaaaaaaaaaaaaaagactgcctcctcttaagatgccagtcacaagtcctgggctaccagtatttctgactaactggctataaattagaggctcccacaaacccctcctcaggtttgataatttactagaacagctcatagaactcaggaaacactttacctatggtacctagttaataatagaggatataactgaggaacagccagactgaagaaatgcatagggcaagatatggaagagggtgtgccaagcttccattcctctctgcgtgtggcatcctcccagcaccctggtatgttcacaaacctgaagcttgttcaagagtacaaaaaattagccgggtgtggtggtgggtgcctgtagtcccagctactcaggaggctgaggcaggagaatggcatgaatccggaggcggagcttgcagtgagccaagatcatgccagtgcccgccagcctgggcatcagagtgagacgccatctcaaaaaaaaaaaaagaaaaaaaaaaaaagaaaaaaactcacagcctgggcgacagagcgagactctgtctcaaaacaataataataataaataaaatttttttttttttgagatggagtatcgctctgtcacccaggctggagtgcagtggcacgatctcagttcactgcaacctccacctcccgggttcaagggattctcctgcctcagcctcctgagtagctgggactataggcacgtgccaccacgcccagctaatttttgtatttttagtagagacgggctttcaccatgtaggccaggatggtctcgatctcttgacctcatgatccgctcgggattacaggcgcgagcccccatgcccagcctgttcaagagtttttatagaacttactctccagtccattcctcctttcagttccaatcctctaattgcttggtctttctggggaccagtctcatcctgacactatctagaggtctcatgagtagtcacctcatgagcagaaattcaggtgtatcacagggtttccttatgaataacaaaagacacacctatttctcaggaagaaattccaagggttttaagcatactgtgccatgaactgggaacaatgaccaaatatacttatccgtgtcactttctatataccagactgtgaaaaataaatatacatttggtctctgccctccaaatctttggaattgctgaagtgtcttttatatgctattgagatgactggtgcctggggctcttccatggcctcaggaagggagctggttgccaggggaaccaaccttgtgacagacagttggaactttcagtctcacctctccaaccaacccctgacctctgtggaagggagaggtgatggaaattgagcttaccaccaatagttaatgaattaataaattatgcctatgtaatgaacccaccaaaacaataaaaggatgaggttgagagcttccaggctgctgaacatagggtagtcctgggagggtagaatacccagaaagggcatggaagccctgaggcccttccccattacctgacctatgcatcttttccaactggccattcctgagttgtaccctttcataataagccagtaatctagtaagtaaactgtcttcctgcattttttgagccttctagcagatgaatagatctgagaagggggttgtggggacatccaattggtagccaagtccaaaagaacttgtgagtaacctggggacccagcacttttcaggggggcagtattgtgggactgagccctcaacctgtggagtctgtcctaagtctagacaattagtgtcagaattgagtaaattttagaatacctaataggtatggagaattgaattgatgtgtgggaaaaaccccacatatctggtgtcagatgtggggaaaagaaagagagatcagactgttactgtgtctatgtagaaagaagtagacgtaagagacttcattttgttctgtactaagagaaattcttctgccttgagatgctgttaatctgtaaccgtagccctaaccctgtgctcgcagaaatatgtgctgtgttgactcaaggtttaatggatttagggctatgcagaatgtcctttgttaaaaaagcacttgaaggcagtatgcttgttaaaagtcatcaccattctctaatctcaagtacccagggacacaacacactgcagaaggccacaggggcctctgcctaggaaagccaggtattgtccaaggtttcttcccaagtgatagcctgagatatggcctcgtgggaagggaaagacctgaccgtcccccagcatgacaccgggggatacccgtaaagggtctgtgctgaggaggattagaaaaagaggaaggcctttttgcagttgagataagaggaaggcatctgtctcctgccaactacttgggaggctgaggcaagagaatggcgtgaacctgggaggcagagcttgcagtgagccaagactgcgccactgcactccagcctgggcaacagagcaagactctgtctcaaaataaataaataaataaattagtaattttaaaaaagttggttggcaggcaccagcatgcaaagaatgccaatattccaaaaatggtctggagtatgtacattaaaatgacaaccatagttccttcttgagtggtgggtgattcatgtatcattgtaatggtcaaaagttgaactaccaacaaagcatggattctttcatattgagtctacttttttttccttctttttgagacagggtcttactttgtcacccaggttggagtgcggtggtgcaaacatggctcactgtagcctcgtcctcctgagctctagcaattcttctcccaccttagcctcccgagtagctgggattacaggtgtgcaccaccacacccagctaatttttgtattttttgtagagacggggtttcaccatgttgcccaggctggtcttgaactcctgagctcaagcgatccagaatctacttcttaaggcagaatgaacccccacctctactcccaaaagcaatgtaagttaatttctccctagaacacaattatcccagtatatacttccttaagttcaactgacttcttcaggccaccataaatctatcaaaaaatcaaagggaaaatatcacctgggtcttgatcattttcttctgtgctcagaaaatagtggataacatggactatacgtctttgtctcttctgcatttgccatgaagtttttgaagttttcctagtcagaaatattagtgtccacttaaagttgtccccagaaattatgatatccaaggccagcaacctccttcttcttccttcattgcttcacttgagttattttgcttctgggagccaggacctgaggactgataaacaaaatggctttcagtgtacattaaccctgggtccagacattgtcactgctgctctgcacttaccttaaataaaagaccctaatatttctaacagttcctttatttgctgcctcagaggttttcatggttctaaatgtgtgaaatctatgcctttcttttgtgaagtagaagtggcatgactattatagagaaggtgggaaagcagaaccagcacagcacaatgcctcagaggcaggtgtctggggaaaagaaagagagatcagactgttactgtgtctatgcagaaagaagtagacataagaggctccattttgttctgtactaagagaaattcttctgccttgagatgctgttaatctgtaaccctagctccaaccctatgctagcagagacatgtgctgtgttgactcaaggtttaatggatttagggctgtgcaggatgtgctttgttaaaaacgtgcttgaaggcagtatgcttggtaaaagtcatcaccattctctaatctcaactacccagagacacaatacactgcggaaggccgcggggacctctgcctaggaaaaccaggtattgtccaaggtttctccccatatgatagcctgagatatggcctcgtgggaagggaaagacctgaccgtcccctaccccgacacctgtaaagggtctctgctgaggaggatcagtaaaagaggaaggcctctttgcggttgagataagagaaaggcatctgtctcctcctcgtccctgggaatggaatgtctccgtgtaaaaccccattgtctgttctatttactgagataggagaaaaccgccttagggctggaggtgagacatgctggtggcaatactgctctttattgtaccgaaatgtttgtgtgcgtgcacatcaaggcacagcacgtttccttaaacttatttatgacacagagacctttgttcacatgttttcctgctgaccctctccccactattaccttattgtcctgccacatccccctctccgaggtggtagagatagtgatcaataaatactgagggaactcagagaccagtgccagcgtgggtcctccgtatgctgagtgctggtctcctgggcccacttttctttctctatactttgtctcttatttcttttctcagtctctcatcccacctgacaagaaacacccacaggttgtggaggggtggcccccttcaaggtgaattctcagacagatcaattttaggaaagagaacacatggaaggctccaagaatgtctttaaaaaccacgtgtgcccatgtactggttcgaaagtctctgtaagctctttgggtatacatacctcgtgtcaagaccaatgtactaagcaaatcacaagaactgtctcatttcacattatgcgctaaaggagtaactttacccaagagagctttgtcctttgcccacagttcctatgaggcaaactctaagcctttggaatacgctgcttgataaaactgtctttggttatcagggcaatttaagccatgccaaattgtctatcctaataatgtgatttactgtgggagaccttggaccacgtggtattagtttgatatctggaggagctggagattgaagtcagcctcataggcagtcaattgtgtgtgtgtgtgttaactgatatccaataaaactctggacaccaaggcctaggtgagtggcaacaatggttacaatggctggcaataataatataagggtgtatatataagaatatgataatttaaaaacgtatgaagcaaaacagaatgagagaggattagacaattcaacaataataattgaagactacattaccctacttgcaataataaagaaaacaaatagaaactcagcaaggataccgaaaacttgaacaacattatcaaccaactagacttaacgaacatttaacactgcactcaacagcagtaaaataaacatttttttcaagagcacatgttatattcttcaggaaagataatatcccatgtgatagcctgagatagggcctcatgggaagggaaagacctgaccgtcccccagcccaacacccgtaaagggtgactcacaagggccccagacccagacagagtcggactcgtcgctgatttcctcagactcttcatccctacagccaaaggacccgtcattaacgccccgcttcctcagcgactgcgttcaaatacagccccaatcaggacgctccacgcaccatcggtacacagacccacaggccgcgagtccatgcccagaactcgactcacccgagcccgaacctctccagacaccactggcagcgacaaaacgccgcatccacgtccgaaaacgcttcctattcagacgcgctcctgcgcggactccgggaagctgagcggtaaagaccgtgaagcgaggcgaggaccacggagcctgcccgggatcgcgagttcagactgcgggcgccgctctatgaggtcacagggctgcgcccatcgcagcgtttctgacaggagcggccataatggctgtgggaatcactcttagtcacctcagtgcctttctctcttcgttgcaagggacactcaagagtcgggtgcccagccaaggccaacacggcgcagtggcattctattcagcctgctgtggaaaaaagatggcggcgccctttgtgcccattatagctgagagtggagccttagctggagcaccatgggcacggccatcttagaggaaggcagcagccgtacggcagagaagatgctcatatccaggacaatttggaaaaataaacaaggtttgaagaagtcacggtgctggccaggaagcggtcacagagttgccaaaaccagtggtcactgaaagtgttagatttggggatagggcgggggttctgggctgggtaaggcttttgtgggttagattagactctgactgaatggacgaagccgagaacaggagtgatgctccattaaatgctaatacccacatggggcttgctattaaaaccactgccagtggggaaggggatgaggaggtgaaggtgcaactgtgttaatatctacatgtttccttccagaagtaaaggaagatgacagtggggcacttaagaatatgaaattattagaatgcgatcatcctactttgcaatgtttccagattttttaaaaagtcacacttaaaaaatattagttctatttttgcagatgttggcgttgtaactgtagaagatttaagtaaatattgtatttttggaaggcaacctagagccaatttaattttttcgttttctttgacacagcaattctaaaagctatctaggcaaatctgtcttaatattaaccacaacttttgtaatttacaaaaaaagggaattacaatgagagatgaatactttggtaaattatggaacatctgctgaactgtaagagtatatatcaatttaaaagaatatgctacaattgttttataaaaaagaaaactttgtcagaggacaaaaaaatgatctgcaggatagtatatattttatggtcttgttattggaagaaatcataaacatcttttggaaaattgtgattggttaaacaagacatttagtttgaattaatattgtttgtgttcataggtagagaatgccatgtttttacttgaaaaatattcccaatttatacttaattttactatctttgtaccataatcatgaatatattataaaacatgttgatcttagaaaataggtatgatgatgtataataagttcatggcatgataaatgcaaaataggctgttttctttcagaaaataaatatgctcatgcatttgaaaaattctggagaatatactaacaatatttgactgttccgtacaattatggtgacttaaaatttcttcattttacttacgttttgtaatttctagagaataagaatttcatgttcgtatttcttgagtgttataacatattccatccaggattaaatttcagccccgttcatctggaatgttaatctctggtaggtaagtttagcacctggtccacaggactatgagcagcccatgatgggaccttcactgatcatttccaggagtgggctgataaaactttgccgtggcaggctgtgctgattcacgggacaaggaaggtgattcaagggcctggttggtggagcacttttgtctgattcattgctggagacaatctgccctgaatccatcctgttacagtgtgggaatggtgatgggagcaccaatccacaatttagggcagagatgttcaaatttaagaaggctctttttataaatgcagagtccgaaccccatccccagaaattctagcttggaatgtctggggagtgactcaagaatttgccttcttttacaagcttctcagagaatgctgaggcaggaaccccaaagaaaacacttagaaagttctatagtgttctggacttaaaaatatgatggctgtgtccccacagtatatttaggctttggttcaaattatatctgcacagaaaagcctatcctgaaaactcttcctaaaataactcaggttacaatctatgaacttaccaggctttatatttcttcctagcacttaactgaattcgattttgtatttatcttactcagtctccttcaccagactgtatgtcatatcaaagccagcactttgcctgttttgttcattgatgtgtctccattgcctacaacatgcctgccatggtgtagaagctcaaaaaatattttcaaagaagtaaattactcaatatggagtcagggattgaattctgccacaatactatatggcaaatgtctattacttttataaagagaactcaccatttataaactggattaaatctcattagatcaagggaaataactctggatagagaaaacaggaaccctgtttctagggaaactaataattttttgccaccaggcctgctcaaagagaaatgattaaggaagttcgcacaaaaaggaaataactaaaggaaatattacatcaggaatgaagaaaaaggaacagaaagggtaaatatattataaaatataatattcttttgagttttaaacattgggtttgctggttggaagcaaaagttacaattttacttgatatggttctcagtggatgtagagatgcttaatatcattttgtgttaggggtgtgtaagttgaggccatgatcatataccaccacacacctaataggaaagctaaagcacactggcaatgccaagagctagaaagggcatggaatgcttacacattggtggtgggaatgtaaactagtacagccactctgggaaagagtttggccatttcttataaagttaaacacatttaccatattcgccagcagtcatgcccccagtgtctatcccaaatatataaaaacttaacgttcgcacaatatcgggtacacaaatagtcacagcatctttatttataacagcaaaacactggaaacaacccaaatgtccatcaacagtgaatggatacacaaaccctggtgcatccatttaaaagaatactaactcagtaacaaaaattaaaactatttagacacctaacaacttggatagatcttaagggtaatttgctgagtgaacaaagccctatctcaaagcttgcgtaccttacgattccattttaatagcattcttgaaataacaaaattagggtaatgggatcagtggctaccatgggtcatattgggaggacagtgtgagtataaagaggtagcaagaggaggccaggcgtggtggctcatgcctgtaatcccagcactttgggaggctgaggcgggtggaccgcccggggtcgagagttcaaggccagcctggccaacacagtgaaaccccgtctctactaaaaatacaaaaattagtcgagcgtggtcgtgggtgcctgtaatcccagctacttaggaggctgaggcaggaaaatctcttgaacctgggaggcggggttgcagtgagccaagatcgtgctattacactccaacctgggcaacaagagcagaactccgtggtttttattattatggttatgtaagataacattgatgatgctaagcaaagaatactcaggaaacttttgtatattttgtaatctcttgtgaatctagaattatttcaaaacaaattttagaaaaataacatttaaggcatttttgtaaactacataatggtacctagtaacttggataaacacatccaaatatactgaattacatttatcagtaaattgaaaaaaataaatttggggcctataatatgtaagaactaataaataacaccagattggcacagaaaacacctgtgttatatataggattaaaatttaatcagtgataagaacagcccgctttacaattatggaatcattgataatatgatgcaaggtatgctgtcacagaatagatatcaagtgtatcatgagtttagatttgtgacagtcctcaaatatggttttttttttttttttttgaggcagagtttcgctcttgttgcccaggctggaatgcaatggcgcaatcttggctcactgaaacctctgcctcccaggttcaagtgattctccagcttagcctccagagtagctgggattacaagcgtgagccaccatgctcggctaattttgtatttttagtagagaggggggcttcaccatgttggtcaggctggtctcgaactcccgacctcaagtgatccacccaccttggcctcccaaagtgctgggattacaggtgcaagccaccatgcccggcattatgtatcattttcatgagacttttttacttcatgaatttcctgatcctttttaaagttactcttcatataagttttatttctgtatgaagtaatgatgatgaggcagcatgtatcactgaaatcctcgtgtattcactgccatctgaaacttgttctccagtatgaaatatatctgccaactgttaaggttttatttctgggcaaaggctttcccatgataatgctgctagtatgtgtaagttcattgatgatctattatgatcactgaagagatagggtctttcttcccatagaaggctttcctagcctactcctttgtaagatttatctcagtaaatacttttcaagacatagttacttagaaaattttcaagacttttctgcattggatgtatcaagtttatttcctacatgtttattgtgacataaaatatgaggtaattaatcaccgaaggcactagtgcattctctgcattcattaaaattcgctcctggaaattgcattgtcttccaagggtgaaaatctagcaacaggctgctctacactgcctatatgcatgtatgctaggagcacactgctgtttaatcagttcacattactaacgtggttttctctctgcatgaatttgtttgtatgtaatcagttcagattctctgcaaaaggactatgtaccttacacatttgtcatgtggacgttgtcatagttttaatgaaggttgacaaatgaaaggttacccccaatccacagactctctctcagatgagtaattttctatacattggtacatcaaagaattcagagcctgaattcatgttgaagcctttctgacattgatagcattcatcctagtgaataacactggattttgaaatatgatttttcatactcagtacacatgtagaaaatctatactgtgaaatctctgatgttgtacaaggcagattttcttcccaaaggcatgaacatgtccactgcattgtcagggtttgtttccattatgagttcgctgatgtacaatgagatttctctttgaggagaaggcttttctacattcactgcatacaaagggtttctctcctgtatgagttcgttgatgaacaattagacggctcttcatagtgaagcctttaccacattcattacatccataaggtttttctccagtatgaacttgcttatgtaaagcaagctctgtttccttggcaaagcctcttccacattcactacatatacaagatttctcttctgtatgaatttgctgatgtacaatgagatagcgtttcatggtgaagccttttccacattcactgcacataaagggtttctctccagtatgagttcgctggtgtacaacaagattgctcttaaaggcaaaaccttttccacattcattgcatatgtacggtttctctccagtatgagttcgctgatgtaacatcagtccgctattcacaatgaaacctttcccacattcactgcacctgtaaggtttctctccagtatgagttcgctgatgtacaatcagccgactcttcaaggggaagcctttcccacattcactgcatgtgtagggcttctctcctgtatgagttcgctgatgtatgatgagcatgcttttcacagtaaaaccttttccacattcactacatagatatgacttctctactgtatgatttctctgatgtacaataagattactcttcctgggaaagccttttccacattcactgcatatgtagggtttctctcctgtatgagttcgttgatgttcgatcatacggctcttcatggtgaagcctttcccacattcattgcatatatatggtttctctcctgtatgatttcgttgatgtatgatgacatagtgttttgtggtgaagcctttcccacattcactacagatgtagggcttctctcctgtatgagttcgctgatgtataataagcatgctcttcccagtgaagccttttccacattcactacatatataggatttctctccagtatgatttcgctgatgtacaatgagattacgcttgcctgggaagccttttccacattcattgcatatgtagggtttctctccagtatgagttcgctgatgttcaatcagacggctcttcatagtgaagacttttccacattcactgcatataaaagatttctctcttttatgaattctttgatgttcatttagcctggactttctggagaacacttttgcacacaaagtacatccataaggtttttctcctgtatgaactctctcatgatcagtgagctgagacttcttgacaaacgctttcccacattcactgcatacgtggtttttttctatttcatgagttctctgatgcttactgacttgggatttagtgctattggcttttgtacttacagagaatttagctgcagaataaagttcttcatagttaccatgaagaaatgatttcccatctccactaaatttagtagagttgttaatttcacagcttttgttctggttgactaaacttaaatttgatttcaaagtttttatatataactcaaatgtatcatgattttccctgaaaagacaaaggcttttggtttgagaggcagtatttccaaatgcattatgttcatggtattgttccacactcttcagcatcctttgattttccaagtgatcctgcagatgatcatcaacttcgttgttttctaggaaagaagagaacaatgaatccttttataatcttgttggggataaaactgtcttcttagaaaaaaaaatccttggtgttttattttgtttattattattattttttgagacagagtctcgctctgttacccaggctggagtgcagtggtatgatctcagctcactgcaacctccgcctcctgggttcaaccaattctcctgcctcagcctcccaagtagctgggattacaggcatgtgccatcatgcctagctaatttttgtatttttagtagagacagggtttcaatatgttggccaggctggtcttgaactcctgacctccagtgatacccctacgtcggcctctcaaaatgctgggattacaggcatgagctaccacacctggccaggtgtttttaaatatcgctatttaatgacaatactacaataatagtataaaagcaacttcatgtatacactttggtaaaaacataataatataaacaaaccaaaaagtaaaagcagtctgtgtgcaaataaggtgaggcagttgacaatctatatcgatttgacagctttctaaacaggaccttgcaaaacatgcggacacagtaaaatacaagcaagtcattattacaagcaaacaacagggcttggaggaacaccattccacaaaattttgggagacaccagaccacaaaggtggaaaaggcaactgattcacaattctgagggttgtatttattcactccactagttatttgtcaaatgactcctatggacaaggcactctgctggcatttgggatacacaaaatatgccttcttttcactcatgctgaattctaattaggaaaaacaatacgaaggaacaaaaaaagaagggagttggtgatgttaagtgtggtttgatggagcagtgtagatgatgagagttggagaaaagcaggatatttttgtataaagaaaagacaaggttaaatgatgaattcaatggggagagtgaggaaagtgagggctcaaagattactaactatatggcttgagccactgggtagatgacagcatctgataatgagatggcaaatattactgcagtccagcacatgtaaagtatatactgtgaaacacactttgaaatggttatcaaatatgtaacacagacatcaagaatctggttggaggtataaatggagaaggcagcatggaaataatcagtacatacatattatttgagaaaaaaggactgaatgacttttttttttttgagacagggtctcactgtcacccaggctggcatgcagtggcacaatcttgcatcactgcaacctccacctcccaggctcaagcaattctcccacctcagcctcctgagtagccgggactacaggcacatgcaaccatgcctgattgatttttgtattgtttgtagagatggagtcttgccatattgcccaagctggtcttgaactcttgggctcaagtgatctgcccacctctgcttcccaaagtgctgggactataggtgtgagccaaggcactgagccaggataccatgttgagaagacatgtagaatgaaagatgaaggtacagaaccaaggttgtagacattccaacatgtggttttgggattatttaagccctgttagaggaaccaaactgtgaatacaaagatcagggtaatatgcttactgagatatatagaataaatacattcacgtacatgttgcctggcaagtaagaattggaaatctccatctgttgaaattaagtcaactgagatagactcttgtgtggtaattgttactaaatttgcccctcttcaatctgtagactaccatctaactttccaaaaacatccatcacgtttaatgaacaactcctatagtcaacactccaccctttggtttagctgtgttgcgttatcatatgtttcattaattatgaaacaggaaaacaatgatagggaattttgcaactggccagtgtaccatgtagttgccttcagaagaaaatgtgctgctgcatgggatatgaaaactgtcattttcttcaatcacattctgcatgcagtagaaaagtcgtatcaaggccaggcacggtggctcacacctgtaatcccagcactttaggaggtcaaggtgggcagatcacttgagctctggagttccagaccagcctgggcaacatggtgaaacacaaaatacaaaaattagccaggcatgcatggtgatatgcgcctgtagtttcagctacttgggatgttgaggtgggaggatcgcttgagcccaggaggttgaggctgcagtgagccaaaatcgtgccactgcactccagcctgagcaacaaagtgagactctaccttaaaaaaaaaaaaaaaaaaaggtcatatccaatttttcccatttcaatgtccctgatacactgtttcctcatctgccaccaataacatctacttcagtaagctacatttatgtctcagcatcagttaagttgtactaaaggataaacttcttctagacaaaggttgtggcatcttcaccttcagtttttcttaagatatttagctgtttcttattattgctacactgctgtcatccaagtgaaaggtcaagactagcaacatattttatgaaaagacaaaaatataaaattaaccaaccctcaaccatgctacctcaattactcatatatacaatcaaaagtcatcttgataaaaaaaagtttacattaccatgaatattaccatgtttctgctccacgatttctccaacaagcagcttctatcactgacctgtatttggccaacttgaagccaatcttttgatagtcaggcccatggccttgcacaattcctatttcatgccttcattcttttttttgagatggagttgtgctcttgttgcccaggctggagtgcaatggcacaatcttggctcaccacaacctctgcctcctgggttcaagcaattctcctgcctcagccttcctgagtagctgggattacaggcatgtgccaccatgcccggctaattttgtatttttagtagagaaggggattctccatgttggtgaggctggtctcaaactcccgacctcaggtgttccccccacctaggcctcccaaagtgctgggattacaggcatgagccaccgcacctgacccatgccttcattcttaattcatgtcaccatcttcctaattcaaaatctagatatgccttgtgcacatcatactcttgctgcaattctgactatcctgccatatgctctatgttctctgtattccttaattaacccctttattgttaatttttatggtaatcttctgtgtagtgaggatctagctctaacctcatccaaacagagatctagcatttgttcttagctattaggaaatgatctctaggcccctggaatgtcctggcccataggagtgtctttgtttgcctggtggctttagccactggacagtttaacaatatgatttgtgataggggctttggcccatgccatatcacttccagcctttggaaaaactggacactctaggtattagcctgacttccaggagaggctgaagactaaaagtcagccatgtgggctgtatgtgactgaaacctaatcaaaactctggccaccaaaggctcaagtgaacttccctagttgtcaatactctgtactgtcacacactgtgtggctgggaagagatgtaacatccacagtgagaggaggaccagagaagtactgtacttggaccccctcctggactacaaatgacctggcaattctactcctaggtgaaggctcaagaaaaatgaaaacatacgttcctaaaaaagttgtacatgaacgttcatagcagcatgattcataaaagccaaaaagtagaaataacccaaatgtcaatgcaatagatgaattgataaataaaatgtggtatatccatacaatggaatattattcaacaataaaaagaaattaagcactgatacatgctaaagaatggaagaatttcaaaaacattatgctaaatgaaagaagccggacacaaaagaccatatatttcatgattctatttatataaaatgtccagaacaggcaaatctatagggataaaaagtagaggccaggcacggtggctcacacctgtaatcccagcactttgggaggccgaggcaggtgggtcacgaggtcaggagtacgagaccaaactggccaacatggtgaaaccctgtctctacaaaaacacaaattagctgggcatgatggtgcgcgcctgtaatcccagctacttgggagcctgaggcaggagaatcgcttgaacccgggaggtggaggttgcagtgagccgagatcacaccattgcactccagcctgggtgacagagtgagactccatctcaaaaaaaaaaaaaaaaaagaaaagaaaagaaaaagaaagtagattagtgattgcctagggctgggggcttggaaacaatttttttttttaagtgatactttgaaaatcttccaaaattgactatggtgatggttacataactgttcatacactacaaagcactgaaaaataaactttaaattggaaaattgtatggtatgtaaattatctaagctgttgaaaaaacaaatctataatgggaaaaacacattagggaaatgaatacaatgctaccgtctaagatgaactaaaggaaaagtagaaatcaaatgtacaaaggaagtactctgagacagacataagttatgacctggtttggtctagaactgatgtaggacataaaacagtcctttctaggtaaacagtaaacaaaaatagtagagacttttaagaagagaactccataggtagaggacattcaatacaacaccagcacagacaggacagatgtatggtactaaaggagaatgcaaccttaaaataagatgggaagggtttcttgtggagggaaaacgattcccattcctaatgtaggcactgcttctgtgtcctcagacacccacagagccttctttcactgactataatattacttacgcatcttgctgcttctcacatacctggacagattcgactgtgcctttcatcttccattgtccatggttcttctcctcgttccaacttggagagtgcatctggtttgctgacttgataacctgtttacgggaaataatagaagacagacacactggattgggctggggtatgtaatgtgagagaatgttacatttaagtaactagacagttttcacatctgaaagtagaggcttctctctcaggaaagggcagattacagtcagaccttaatatctgaaaatttcacatccagggattcaaccaaccatggattgaaaatattttttaaaaaacaataaaaaatacaataataaaaaaaaatacaaagtgcagtggctcttgcctataatccgagcactatgggaggctgacatgaaaccaacatttgaagccaggagtgggagaccagcctgggcaacatagactccatctctacaaaaaaaaaaaaaaattagccaagcatggtggtttgcacctgtaggcatagttcctcaggaggctgaggcaggaggaacacttgaacccagttcaaggctgcagcgagccatgaaggcaccactacattccagcctgagtgaaagaccgagacactgtctctaaagaaaaaataaataaataaattaattaaaacatatagtataacaactatgtacatagcatttacattgtattaagtatcaggcataatttggagatgatttaaagtattcaggaggaggtgtgtgtaggttatatgcaaatacaatgccattttatatgagacttgagcatctgtggatttcatatccatggaaagttgtgaaaccaatccctcttggacactgaggggtgacggtatatccttttatcagaagccagaggatgtgccaaaaatctaatattcagagcactgcagtaacttccaagggtaagcaactgagaaagcaaaggccacagactgggcaccctccaggtgacacagagcagctgtcctcacccattgatagcaggttgctgtagatctccaacatcacatcccggtacaaatccttctgaaaagggcccaggagctgccactcctcccaggtgaactccacagtaacatcctccagtgtcagcaattcctgtaagaaaacagagccttgcttaataggaagtgtttctcttttactgacatgaaaagaaagtgaagggaagttgtcccgctcacattaaacatatagactgcatccatctataagtctattgtattttttaatattgccagagaatctccaagtattctataattgcacagtgccccatttgctcaacaaaaattaaggttttatatcaaatcctctcagtaaaagcgggttttatgtataaattttaattttggtatctattgaccagtcaagaaagtatatgctactgacatctagatatctgatataaattgtttcattcactgttaagccttcccagctaatactagcataagacatagagagacttcagatgctagaaccacaggatactacattcatgtttaattgttaaatggattaaaaaatagaaatgtacagaaaacatgagaaactattaaagagtaaccaaattgggaaaacttattcttggaaacatacattaaatatatatgtatgcacacatacatataaatatatgtttatgtatatatacgtatacagtcacaggtatatgtgtctattaacagaaaggttatattaaatacactgaagagataattagtgagttggaattcacagtaaaaaaaataacagggccaggtgtggtggctcacacctgtaatcccagcactttgggaggctgaggcaggcggatagcttgagctcaggagttcaagaccagcctgggaaacatggtgaaatcctatctctaccaaaaagacaaaaattaaccaggtgcggtggcacacacctgtgatcccagctacttgggagggtgaggtgggaggattgctggagcccaggaagttgaggctgcagtgagctgtgatcatgccactgtactccagcctgggtgacagagtgagaccctatctcaaaaaattaaaataactgaaaaatgaagcagagacacaaagtgacagaaagtatgaaggagactttactaaatatggaagacagagtgaggcctaacatatgcctatacatagtttttgaaatattatattcaaataagagaagcaatttccaaatatctgactgagaaattttcagaactgattaaatatcctataactcaaatttaataaatcaacaaagccaagcagaaaatctgcatctagacacatcagactgaaactattgaacatcagatgcacatataacattatgcaaacaactgttaatagaaggaaaagatgcattaccatcaaaagaaaaataaaatgtcctaacaactgacttccacagaaacaaaagaagcaagaaaagtgcagaataatgtcttcaatgtcctgattctgtggcaattggcaaattgtatggtatggcctagccctgaatgccactggaaaataaattgagaccctcttgtcaactaaactgccactctcctgtctcaacatgacttataatcacatggtagtaggaacttgaggcaggaaagagctaggtgcaaatttgtggggaaaagcaagagagatcagattgttactgtgtctgtacagaaagaagtagacataggagactccattttgttctgtactaagaaaaattcttctgccttgagattctgttaatctatgaccttacccccaaccccgtgctctcggaaacatgtgctgtgtcaaactcagggttaaatggattaagggcggtgcaagatgtgctttgttaaacagatgcttaaaggcagcatgctccttaagagtcatcaccactccctaatctcaagtacccagggacacaaacactgcggaaggccgcagggacctctgcctaggaaagccaggtattgtccaaggtttctccccatgtgatagtctgaaatatggcctcgtgggaagggaaagacctgaccgtcccccagcccgacacccgtaaagggtctgtgctgaggaggattagtataagaggaaggcatgcctcttgcagttgagacaagaggaaggcatctgtctcctgcccgtccctgggcaatggaatgtctcggtataaaacccgattgtatgctccatctactgagataggggaaaaccgccttagggctggaggtgggacattcgggcagcaatactgctttgtaaagcactgagatgtttatgtgtatgcgtatctaaaagcacagcacttaatcctttaccttgtctatgatgcaaagacctttgttcacgtgtttgtctgctgaccctctccccactattgtcttgtgaccctgccacatccccctctcggagaaacacccatgaatgatcaataaatactaagggaactcagaggctggcgggatcctccatatgctgaacgctggttccccgggtccccttatttctttctctatactttgtctctgtgtctttttcttttccaagtctctcgttccaccttacgagaaacacccacaagtgtggaggggcaacccaccccttcacaaattgatgggataatctatccccatataatcacagagattaatacacagagaaaagaacagacttgctgaagtctgcaaattcttaatgctgctgatctcatcacattcgggaattatttcacacgagaaataaatctgtttgaaaaaaaatgtaggtttctacctaatttcatactcaaaaataagtttttcctgtttaaagtccttaccagaaagcaaaagaacctgtggaagcagaagcaaatacgaaatatattcatgttaaaagccataaaggaaaaaaaagggacaaattttatgagaaaaaaaatttaatttctacattgaaaaacagatcataaacaaagctgaaagaaaaatgacaggctaaaaaaaactttgcaataaacaaaagatcaatatatagtagatataagcaactcattagccagtaagaaaaaagtttttttaatgtaaaaatcataaagtcaggcatttcacaagagaaaaaaatccagttggccaagaaatacacaagaaggctttcaacctcacctgtgatgaggaaaatgcaaaataagacaaaagaatattggatcattgaaaattgtataatttgataatgtcatatttttaagtattggcaaagatttaaggcacaaaggactccatgtatcagtttctatgtggcaggcactcatctaaatactttacatagtttaacaatgttttcatgtatgactttagacaaatggaattttatacagtcaatattcttcaattaattgcagtgattattcctttatattctaaaactacaccacctaaggtaggggtgtccaatcttttggcttccctgggccacactggaagaagaaatgcgttgggccatgcataaaatacactaacactaacgatagctggaaaaaaatgcaaaaaattctcattataagaaaatttacaaatttgtgttgggccacattcaaagccatcctgagctgcatgcagcccacaggccacaggttgtacaagcttgatctaaggtgaccaacaggtggaatgtgattccactgaagcaaaagaagtcataataaatgtgtttatatatgcagacacatacataaaacacatggatttataaatacacatatatacagagatgcacacatttcagtgacagcaagtatgtgctaccaaacatttgttgaagcagtataagaggattaggaagaaagttatgaagagggaatctacttttactttttttaccttttttttttttttttttttcgagacggagtttcgctcttgttgcccaggctggagtgcaatggcatgatctcggctcaccacaacctccacctcccggattcaagcgattctcctgtctcagtctcctgagtagctgggattacaggcatgcgccaccacacccagttaattttgtgtttttagtagagatacggtttctccatgttggtcaggctggtcttgaactcccgacctcaggtgacccgcctggttggcctccaaaagtgctgggattacaggcgtgagccactgtgcccggcccggaaatttacttttttaaccagtgtgtacttcatcatcagaatttatttccctgtgaggccaggtgcagtggctcacgcctgtaatcccagcactttgggaggccgaggcgggtggatcacctgaggtcaggagttcgagaccagcctggccaagatggcaaaaccccatctctactaaaaatacaaaaactagccaggcatgcaagtgcacacctgtaatcccagctactcaggaagctgaggcagaagaatcccttgaacccaggacgtggaggttgcagtaagccaagatcacgcactgcactccggcttgggcaacagagtgagattccatctcaaaaaacaaaaaccaaaaaaaaaaaaaaaaaaagaattttttccctttggattccatgagtaatttatgtaattacaaaaaataaaagcaatataagtatgcaagaattggaggtgaaaatgcagaaggatattgtatattctgagatgaggtgaagttatcaaacatggcacccaacgactcaagaccttatcagacaactccctaatgccaaatctgcagttaatgccagttcagccacatgttcaggaaaatggaagctatgcacaccttccattttcctaggtcacttagattttattcctaaataagctcacacagacacgcaagacttgagtgtgtggccttgctttcgtcccctaaaaaaactgtttccactgagtttgcctggtctatttccataggagtctctgaggaaccgtgtaataaacagcagtaagaaatcttctgcctttattagaaagctagttcaaaacactgttcaccatatcacctctgggaagaatagcaaatttttcttgagatctaagtgccatgaaataataatctcctgaggaacctgtctgctttctccccacagtcactgtataacttagtgtgactttcttgtactggctgtcagagacatcagatgcaaactgagagctaaggtaatggaaaggatcttctagtcaggcattattttccaacatcagtcattttgtaggaatcacataaacactatattcctgatcttactttgccatgatgttggagttagatttaaagtttatttctctctagattctgaaatgatttcttacgggtctctacaaatccactatggaataaaggagagaataaaatagagaaaaagtcacctgggcattgatcattttcttctgttgtgggaaatggccagcacctgggatactctgtctttgtctcctctggatctgccttaaatttctatttagaaacttcagtcaccagtgaagggtgtccacagaaatcatatctaggtcctggaatcttcctctttcttcatttacttcttgtctcttcccagggtagccaggacctgtggactgaagagcaaaacaactttcaggggtacattcaccttaacacgtggccctgaatatttgtctctttatttggttctctcaaaccaaggaaacacaagaccctcaatgtaggccaaatgcctttcttcggtgaagtgtggaagtaacatgaagatgaaaggggaggtcacaaaggagaatccacatagcatcatgcctaagcagtaggtaattctcatatcagttttttaaatcaggccatatggatggtgagaaactacattttttcctttatacaatgttactctcacacctctttaaaagtctttatatatatttaaaagtgtttatatacggccaggcatgatggcttacacctgtaatcccagcactttgggaggccgagatgggcagatcacctgaggtcaggagttcgagaccagccttgtcaacatggtgaaacactgtctctactaaaaatagaaaaaattagccaggcatggtggcaggcacctgtaatcccagctactcggagactgaggcaggagaatggcttgaacgcaggaggcgaagtttgcagtgagcccagccattgcactcaagcctgggcgacaaaagcaagactccatctcaaaaaaaaaaaaaaaatgtttatatacacacttcaatatgaagaacaagaaacacatagaaaaaaagagggagacagagaaaaggaatacgagttataaatacaaatttagaaaacaattcaaaaatataaatactgggaaaatagccgcctttatatactaacatacaaaacctgaaacacccataaaaatatgcagtacatttgcaagaggaaggataaaaataggctcttgttaatttgtgcgcagtaatttaaaaacataatgttaaatagaaagcctattcatccgccccccttcacccccaaaaaactttcattttctgcaggttcaagagcatgggttgttgtggaaagccagaggattagaaaactcattgtggaggaggtactcggacctgaaacttttaggaaatgttaacgttcatcaagtctgttccagccaaagtttgagctcaacacacacacacacacacacacacacacacacacacacacacacacacacacacaaaaccagccagggctcttgtgaaaagacttcggctttcacttgtctctagacaaaagaccaccaccccgccagataaaataggaaaacctggaatagacacacacgtacactggattcccttaatgattcatcaatcactaagcctcagattaatccagaatgtgaaacagaagtcacattcgttgacaaaagccaccccatcgattctcaatcactgagccccactggggagtgacccgcgaggaccacaatccctgacctcagtactcttggtcgttgatctattcaggcctttaatcactgaccaccagagcctccatgagggaccccaaagatatcctatcacagacacccaccagggactcctaccagctcccctccaaaaggaaacacccgcccccgcctcccccaacccccgcgctacctccaccatatagcgccaccaacaacgcagacgccctcagaaagctccctcccaccacgtttccacgccctgacccacacactgacctgactctccttggaatcgccgcgacctcttaaaagctgaacttacttccctaaacttcttccacttctgggcccctcgcccaactccctccccctctaaacctccagagacggtcagccgcgtttccatggagagcggaatgcggccttccggcttttcctcaggaggagacgcgtccgcgccggcgtcgcctcgccgctctgggggcggccatctttgagtacgtgacgtacagaaggcacagcggccgggagacgcggtggacggaggcctcttaaactgtccgatttccagacacctcagccctggcagaaaatggagagcttatcagaggcttgagttcacacaggcagacacggcgtgggggtaaagtcctctgaacagacacggaacagaaataagttagtcttctcctcgcaggggacagtgaacggcgcaaacttctcaaaggccagaacccattattaccacaaaggcgcggcatcccttcttagcggttatgatggctgtgacgtctcagctcaatggaaaattaaagtcacctctgggcacctcagtcactattgtaaatgcgaagcgttttagaagccgtataaaaactgaagcaagagagactagaacaaaaaataagcgagcggtgcgttgcaggtaacggagccagagcccttaggggagagcatcatgggggcggccatcttaggggacgttcggtgtccgtacggcagaacatattctctctgagaagcttgcggtggaactggcccatggaaatgtctttagaagagaagaaccacctggctctgttcttgactctggaaaagaatccttttctagaattatttaggttgttgccagattaatttcctttagagagtttccttgcccccacgacttcctatctttaaagccaacaatagtatgtgaaatccctttcatatttgaaaccactgactattgctgctgcatctctccggtttctcctattcttaagtgcttgggcaatccagaataatctcccaatgctaaagtcagctgattaataaacttaattacaatgcagagtcctttttgccatgtaacataaccatgggaattactctggggttgtagatctggctatgatatgatgacactaatgaatattttgcaataaaaacatactattttaaaatatatatatacatatatctttatatatgtatatttctacagaattattacaagttatgtcttatgatggtttcttataagaagcaaggaggaaaaggtccttaacattttcaattgtgttttttttaataataaagcatgcattctaatttacaaaaaccacaataaaggtactttcatcatgtcagtcttgaggctgaacaacacttaacattctttttccttttacctgtctgccttctcccttcccctacactctctataccccaccctccaggctctctgttccatcatcttatgcgtatggcccctttcccctgtgccctcttattacttccatctatcacgcagacacacactgtcactcccctaaacactctagtgttaaacaattgctgctgattgttttttgacaagtgccctatgggtaggagtgttcacataaataaagtcaagccaaatagagaaatactatgagaatagacctattcagcaggctgcaaagcaggcttagtagtgaacattctgtggggatggaggcttttgggtgtttcagagccatttctgccattttcagagccatttctacctcctcaagtgcagatattctgctagggtgcagatattcactgttactgttgttaaaaggtggttgcttttcaaggctaccttgaagctgaggatatggggataggattagggcaagctaaataccacaagctcactgtggccggcattgtagacttaattggccattctagaagaggaactaactggcttctagccagggcctaaaaactagatctagatagccaaaaagattacattaaacttcctctagtgtcccatctatcagattccaatcctgaaggaccaagtcaatctctcttctatttcatctcctttctcccatcttataaaagatctttggaaaactctgtttatttcatatataacagagctgatatttgtatgttttgtggagatgatgtttcatcatgttgcccaggctggtcttgaacttttgggctcaagcaatcctcccacctcgaccttccaaagtgccaggattacaggcataagccaccatgcctgtcttaacatttaatcttttcaaattacttcactatgtattcttttttgttgttgttctttttttctgtttacttcactgtgtattctaagcacaaataagaaattcttatttcctaattattgtttatttccatatatataatatatttttttaataagtttttttttagactgcatctcactctgtcacccaggttggtgcgcagtggtgcaatctcagctcactgcaaactctgtctcccgggttcaagcaattcttctgcctcagcctcccaaatagctgggattacaggtgtaccaccacacccagctaatttttgtatttttagtacagacatggtttcaccatgttgttcatgctggtctcaaacttctgaactcatgtgatccacctgccttggcctccgaaagtgctgggattacaggaatgagctccaacacctggcccatttcctaatatttgtatacacttgctatatttttatttttaccacacataaaaatcaaggcaaatgcaagccatggatcttatacatacaaaggcatgtagaactataatcatatagtgaatattcatgcatactgaggcaggtttttagatgctcagagtctgaaattgcactgcatggtatttccataaaatgtcctggggcatactcggacagaatagctcaagtgcaaattataagcatatattccccaaattgtatcctgtttgaattcatcaaagttgaaatgaaggaaaaaataataagggcagctgtggggaaaagaaagagagatcagactgttaacttgtctatgtagaaagaagtagacaaaagagactccattttgttctatactaagagaaattcttctgccttgagatgctgttaatctgtaaccctagctccaacccagtgcttgcagagacatgtgttgtgttgacagaaggtttaatggttttagggctgcgcaggatgtgctttgtttaaaaagtgcttgaaggcagtatgcttggtaaaagtcatcaccattctccaatctcaagtacccagagacacaatacactgcacaagcccacagggacctctgcctaggaaagccaggtattgccccaggtttctccccatgtgatagcctgagatatggcctcatgggaagggaaagacctgactgtcccccagcccaacacccataaagggtctgtgctgaggaggatcagtaaaagaggaaagcctctttgcagttgagataagaggaaggcatctgtctcctgctcatccctgggaatagaatgtctcggtgtaaaacctgactgtatgttctgtttactgagataggagaaaaccaccttagggctgcaggtgagacatgctggcagcaatactgctctttattgcaccgaaatgtttgtgctcgtgcacatcaaggcacagcagctttccttaaacttatttatgacacagagacctttgttcacatgttctcctgctgaccctctccccactattaccctattgtcctgccacatccccctctccgagatggtagagataatgatcaataaatactgagggaactcagagaccagggccagctgcgcaggtcctccatatgcagagcgccagtccctggggcccccttttctttctctatactttgtctctgtctcttatttcttttcctggtctctcgtcccacctgacgagaaacacccacaggctgtggagggggtggcccccttcaggcagccagagagaaaggtcggcttacccacaaagggaagcccatgtgactaacagcagatctctcagcagaaaccctacaagccagaagagagtgggggccaatattcaacattcttaaagaaaagaactttcatcctagaatttcatatccagccaaactaagcttcctatatgaaggaaaaataaaattctttacagacaagcaaatgctgagagattttgtcaccaccaggcctgccttacaagagctcctgaaggaagcactaaacatggaaaggaacgaccggtaccagccaccacaaaaacatgccaaattataaagaccatagatgctaggaagaaaccacatcaactaacgagcaaaataaccagctaacatcataatgacaggatcaaattcacacataacaatattaaccttaaatgtaaatgggctaaatgctccaattaaaagacacagactggcaaattggatagagtcaggacccatcagtgtgctgtattcaggagacccatctcacgtgcagacacacacatatgctcaaaaaaaaaaaaagggatggaggaagatctaccaagcaaatggaaaacaaaaaaaagcaggggttgcaatcctagtctctgagaaaacagactttaaaccaacaaagatcaaaagagacaaagaaggccattacataatggtaaagggatcaattcaacaagaagagctaactatcctaaatatatatgcacccaatactggagcacccagattcataaagcaagtccttagagacctataaagagacttagactcccacacaataataatgggagactttaacttgccactgtaaacattagacagatcaacgagacagaaagataacaaggatatccaggaattgaactcagctctgcaccaagtggacctaatagacatctaccgaactctccacctcaaatcaacagaatatacatttttcctagcaccacattgcacttattccaaaattgaccacatagttggaagttaagcactcctcagcaaatgtaaaagaacagaacttataacaaactgtctctcagaccacagtgcaatcaaactagagctcaggattaagaaactcactcaaaaccgctcaactacatggaaactgaacaacctgctcctgaatgactactgggtacataacgaaatgaaggcagaaataaagatgttctttgaaaccaatgagaacaaagacacaacataccagaatctcttgacacagttaaagcagtgtatagagggaaatttatagcactaaatgcccacaagagaaagcagaaaagatctaaaattgacaccctaacatcacaattaaaagaactggagaagcaagagcaaacacattcaaaagctagcagaaggcaagaaataactaagatcagagcagaactgacggagatacagacataaaaaacacttcaaaaaatcaatgaatccaggagctggtttttgaaaagatcaacaaaattgatagactgctagcaaaactaataaagaagaaaagagagaagaatcaaatagacacaataaaaaatgataaaggggatatcaccaccgatctccagaaatacaaactaccatcagagaatactataaacacctctacgcaaataaactagaaaacctagaagaaatggataaattcctggacacatacaccctcccaagactaaaccaggaagaagttgaatccctgaatagaccaataacaggctctgaaattgaggcaataattaatagcctaccaaccaaaaaaagtccaggaccagacagatttacagctgaattctaccagaggtacaaagaagagctggtaccattccttctgaaactattccaataaatagaaaaagagggaatcctccctaactcattttatgaggccagcatcatcctgataccaaaggctggcagagacacaacataaaaatagaattttaaaccaatatccctgatgaacatcgatgcaaaaatcctcaataaaatactggcaaatcaaatccagcaatacatcaaaaagcttatccaccaagatcaagttggtgtcatccctgggatgcaaggctggttcaacatacacaaatcaataaacataatccatcacataaacagaacaaaaggcaaaaaccacatgattatctcaatagatgcaaaaaaggcattcgacaaaattcaacagcacttcatgctaaaaactctcaataaactaggtattgatgggatgtatctcaaaataataagagctacttatgacaaacccacagccaatatcatactgaatgggcaaaaactggaagcattccctttgaaaactggcacaagacagggatgccctctctcaccactcctattcaacatagtgttggaagttctggccaggacaatcaagcaggagaaagaaataaagggtattcaattaggaaaagaggaagtcaaattgtccctgtttgcagatgacaagattgtatatttagaaatcccatcgtctcagcccaaaatctccttaagctgataagcaacttcagcaatgtctcaggatacaaaatcaatgtgaaaaatcacaagcattcctatacaccaacaacagacaaacagccaaatcatgagtgaactctcattcataattgttacaaagagaataaaatacctaggaatccaacttataagggatgtgaaggacctcttcaaggagaactacaaaccactgctcaacgaaataaaagaggacacaaacaaatggaagaacattccatgctcatggataggaagaatcaagatcgtgaaaatggccatactgcccaaagtaatttatagattcaataccatccccatcaagctaccaatgactttcttcacagaattggaaaaaactactttaaagttcatatggaaccaaaaaagagcccatattgccaagacaatcctaagccaaaagaacaaagctggaggcatcacgctacctgacttcaaactatactacaaggctacagtaaccaaaagagcacgatactggtaccaaaacagagatatagaccaatggaacagaacagagcccccagaaatagtaccacacatgtacaaccatctgatctttgacaaacatgacaaaaacaagaaatggggaaaggatttcctatttaataaatggtgctgggaaaactggctagccatatatagaaagctgaaactggatcccttccttacaccttatacaaaaattaattcaagatggattaaagacttaaatgttagacctaaaaccataaaaaccctagaaaaaaacctaggcaataccattcaggccacaggcatgggcatggacttcatgactaaaacaccaaaagcaatggcaacaaaagccaaaattgacaaatgggatctaattaaactaaagagcttctgcacagtaaaagagactaccatcagagtgaacaggcaacctacagaatgggagaaaatttttacaacctacccatctgacaaagggctaatatctagaatctacaaagaacttaaacaaatttacaagaaaaaatcaaacaaccctatcaaaaagtgggtgaaggatatgaacagacccttctcaaaagaagacatttatgcagccaacagacacatgaaaaaatgctcatcatcactggccatcagagaaatgcaaatcaaaaccacaatgtgttacaggaaggcagggaccccaaacagagagaccagatggagctgcggcaaaggaacataaattgtgaagatttcactttaatatggacatttatcagttctcaaataatacttttataatttcttatgcctgtctttactgtaatatcttaatcctgttatcttcataagctgaggatgtacgtcacctcaggaccactgtgataattgtgttaacagtggttctgcttttgccctttgccctgtgatctttgttggacccatatcagtggttctacttttgccctttgcccttttccctcagaaagatgtaatctttgttagacccttatcagtggttctgctttttgctctttgaagcatgtgatctttgtacctactctctgttcttacaccccctccccttttgaaacccttaaaaaaaaaacttactggtctgagactcaggcgggcatcacagtcctaccgatatgtgatgtcacccctggaggcccagctgtaaaattcctctctttgtattgtctttatttctcagccggctgacacttatggaaaatagaaagaaactacattgaaatattgggggcaggttcccccaataacaacgagataccatctcacaccagttaaaatggtgatcattaaaaagtcaggaaacaacaggtgctggagaggatgtggagaaatatgaacacttttacactgtttgtgggactgtaaactagttcaaccattgtggaagacagtgtggcgattcctcaaggatctagaactagaaataccacttgacccagccatcccattactgggtatatacccaaaggattataaatcatgctgctataaagacacatgtccatgtatgtttatcgcggcactattcacaatagcaaagacttggaaccaacccaaatgtccatcaatgatagactggattaagaaaatgtggcacatatacaccatggaatactatgcagccataagaaaggatgagttcatatcctttgtagggacatggatgaagctggaaaccatcattctgaacaaactatcacaaggacagaaagccaaacaccacaggttctcactcgtaagtgagaactgaacaatgagaacacttggacacagggtggagaacatcacataccagggcctgtcgtggggtgaggggagtggggagggatagcattaggaaagatacctaatgtaaatgacgagttagtgggtgcagcacaccaacatggcaaatgtatacatatgtaacaaacctgtacattgtgcacatgtaccctagaacttaaagtataataaaaaaaattaaaaaataaaagattaatgggccagggttgtggctcatgtctgtaatcccagcactttgggaggctgaggcaggtggatcaactggggtcagtagttcaagaccatcatggccaacatggcaaaacgtggtctctactaaaaatacaaaatttagccagatgtggtggtgcacacctgtacacacttgtaatctcaactactcaagaggctgaggcataagaatcgcttgaacccggtaggcagaggttacagtgaaccgagatcatgccactgcactccagccctgggccacacagcaagacttcgtctcaaaaaaaaaaaaaagaaaacaagattaatgttccctctgaagaataaacatacatagtggggtattctgcagggtgagtaaagtagaaactttatatattcaacccaaagcatattttgttaattagcactgtggccactccactagaacagagtggaaccccacccacactttgatttggatgctgggactgatgacgtcacatagtgaagtatcatgagaatatttgttacataatgagactctggaaagagcaggagacttcccaagctggttcaaaagtggcttgtgagagcaggaaaatgtgttgtgactatggttaaggagtagggcaagggtaaaggtacccaggcatgtcttgaacttccagcatataccaaagaagggagcactcaggctttattatcaacttgcccaaatagtgtggcttaaaagatgtcagtaatcaatcaaaaaatagattcagattctttaattcaacactgaatgtttactcttgaaactcctgacttctaggttgagaaagacttaatttcctcatgctaaaaaccttatacatgtcctttcttcaagcataaataggaccctttacataactgttgaaagtgcttccgaaatactgcttagacaaattgtctacaatatttttacactagtcttgtgaaaattaatgtttataagactataaaaattgaataacaaaaaagccatttttcaaaaagctgtaaaaatttctgtatgaggttatcataataagcatggcattctataatttctcaactatagcaaaacttcatttctattatttatttatttattatttatttatttattttgagacacagtttcactccagcctgggtgacagagactctgtctcaaaaaaataattgttattattattatacactttcctagaaatcatttaacccaatttatagatttacatttgttcccttgtacttcagtgaaaaacttggaggatccataaatcaaggtggtattttcagatttgtgtggcaaaaaatttgtacagagaggctgggagcggtggctcacacctgtaatcccagcactttgggaggccgaggtgggcagagcacgaagagatcgagaccatcctggctaacatggtgaaaccctgtctctactaaaaatacaaaaaaaattagccaggcgtggtggtgggcgcctatagtcccagcgacttgggaggctgaggcaggagaatggcaagaacccgagaggtggagcttgaagtgagctgagatcgcgccgctgcactccagcctgggcgacagagcgagactctgtctaaaaaaaaaaaaaaaaaaaaaaatatatatatatatatatatacacacacacacacacacacagagaaatgacagatgcaaagcatgtgttctatcaatatgtagaaggtcccttacattttaagttcagtgaaataattagaatgatacaagatactgaactgaaattgtacaatgtggaagcaaaagctctgttactaatgtgcaagtatatcaacaggatttttaaaacacaacatgctaattataccttaaaatatatttctcccagtctgggcaacatgacgaaacctcatctctacaaaaaatacaaaaattagccaggcatggtggcgtgagcctgtgatcctgaggcaggagaacatggtctggaggcaggaaacctaaggctgtttcacgctaacgtccttaagctaaattgatgggaaaaccctaactttccacacctaagtaacaaaaggaccagagactactccctttgcaaacctctaccttttctgcctggcagatgggaaattaaaagtacctctgattggttgctttttgcaaccaatcagatatttgcgtaggagtgtgacttttgtaactttacttcagcctctgattggttgactgactgcaggccaccatttcatttacattaggtcagcaccaagcagccaacgggaaacctctagtagtcatttggacccaagaagattctgtatctgggccactgcttgggcctgttcccacactgtggagtgtactttcattttcaataaattcctgttttcattcttttgatgctgcattctttcattgctttgctgggtgtttcttccaagtctttgttcaaaatgccaagaacctaaacaacttgcagtcaagaccctctactggtaacatattctggtgagctagccaggagagaaggtaggcccaaagtttgggatttctttttctcctttccccttttacatacagggaaatcttcctctctccatcttttcctttccaactgaggaccctcagtggacagcacctaagcacaaagacacttgcaagtttctggccagggccattctctggtgaaactggaaggtttccgtgtggaagtgcctaactgccaccgcttggttaaggtgaggaacctgagtccttttcctcgtttttgtttttctgagtcctattcctttttttttttttctgagttattttccttttctcctttttcagtctttcagcggccgtttcctagtagctcgttggtaattgaggggaactgactggggccactctctggtatcctctgaaggccaaggagtgaacagggatggctgccctgcccagaaagggaaaagactcatttctgtccttttcagttataatccctgatccctatgtgtgatgcagttagcagcagcagctcgtccagggcaaactcacaggtttcaggtgacttatgctgcttttatttatgctaaattcttcccttctcccacccaactggcaaaggacagaaaacccacctagctatgcacaaaaggttacacaagtcagagggtccgggcatgtggtctgtgtggtgcatggtggtggagggaattcatgaaaaggaatttattattgcctaagttgagagcgttaaagggttgttttaagtgagatagaaaaactttaagtcaggtcctcagtgatggagggaaccattccaaagtggtgccagcacccatctaaggtcagagatgtctgacagactaagttggggccctaaaggggggatgccccaggtaaaatttgggtcacctaatgagccctccacttttcaaagtcctcttctcttttccaaaccactatgggcaactctccacctattccacctgattccacacttggctacatcctcaaccatggaaatcaatttgaccctgacactctaaagataaaatgtaaaattttttttgcactattgtctgcccccattatgaactgcccagcctggaacaatgggcagtcttggtagccttaattatgacaccatcctgccattagacctattttgcaagaggcagggcaaatggtcagaaatcccatatgcacaggattttatgaccttataccaaaacctagcaatctgtcaaactcccagaacccacccccaccaccaaaggaaagttctaaggtagaattagatattatagatgatcccccccactcttactttttcttttttgagacagagttttgctctcatcgcccaggctggagtgcaatggcttgatctccgctcactgcaacctccacctcccaggttcaagcaattctcctgcctcagcctcccaggtggctgggattacaggcacacaccaccatgcccatctaattttgtatttttagtagagacggggtttctccatgttggtcaggctggtctcgaactcccgacctcaggtgatctgcccagctcggcctcccaaagtgctgggattacaggcgtgagccaccgtgccaaaccagatgacccccttttacaagagccacttgtctctaagggtgaagagcgaccatccctatagcccccttaccaagtgctcctgaggctaaaaccaggagcaaacactggggaccctactaagtcccccaaacactcagtggggaacaccatattctactctccctccagccttgctaccccgtagggaagcagcaggagccgaatggccagtcctattgcaggtccccttctctataactgatatacagcaatgtaaggaaaagctaggaagctactctaaaaatcctaggaaatttgcagaagggttccaaaagttgaccttattactattgcactccagcctgggcaacagggtggtgacatgataataatgtcaatttacaaagatgatttgagaatcttgtctgtatgcacttaaaaccagctgcaaaacatgtgaagcaacaagtgacagaagtgaaaagaatgtacaaatctaggtggagcacagatttttaggttagtgaaacatactccgtatgtttcccatatcccaaagcaacactgtatttgtcaaaggacactctgaacacaacaagctcagtgacttacattgtaaatttacatcattctccaccatattccatgctgcttaactcacacagtacagtgaccttaatcttccagaaaacatggatatgaaggaaccacacctaatgaagcaggccctctcaccttactgatttattcccagagaccacaatgaaagatgtgtaggaaaggcaagacttcatactttaggatgaaggtcacaaatagtcaactagcctttttaagaaatgtcaaagtgaatacaattattttatatactgaattggccatttccacacacgctcttgatcctttgatgtacatattacctggggttttaacaaattttgtcttgtggttattttaccgtatgtatcattccaggtcaatcctggatggagaagcagacttagttatccatagtatgatttacctaacatggaatctgttgagaaattttttttttttttttttttttgagacggagtcttgctctgtcgcccaggctggagtgcagtggtgcaatctcggctcactgcaagctcagcctcccgggttcaaacaattctcatgcctcagcctcctaagtagctgggactgcaggcacgtgccaccacgcctggctaattatttgtatttttagtagagacggggtttcaccgtgttagccaggatggtctcgatttcctgacctcgtgatctgcctgcctcggcctcccaaagtgctgggattacaggcgtgagccaccgcatctggctgagaaatggtttaaaattttaccacgttaattacatttgcaaggtttctatccagtatgaataatttggtaaagcctgaagacacactactgattaaaggtccttccatgttaagcacactgatatgacttttttcctgtataaattctctcaaactccaaaaacatgaacatttgatttttttatttttttgagacagagtctcactcttgtcacccaggctggagtacaatggcgcaatctcggcttacagcaacctccacatcctggattcaagtgattcttctgcctcagcctcccaagtagcgggattacaggtgcccaccactgcccagctaatttttgtattttttagtagagatggggtttcaccatgctggccaggccggtctcaaactcctgacatcagatgatccacccacctcggcctcccaaagtgctgggattacaggtgtgagccaccatacccagcccatttgatttttaaaaaggcttaccacattcgttacatttgtaagactgttctccagtatgaatactctgatgtttccatttggatgttcgggtaaaaagtcttagcacacacattacatttgtcaaagatgtatattctgaggtctagtgagttcagacacctcggggaagcctctagcacatacatttatacgatttctttccaatataaactctcaagtagtgactgaactctggtgaagcttctgccaccctcatttcatttgtaaagcatatctgcactttgagttatagatccacaagttttgacctttaagtagtattcttgccacatatactacacttctgtgatttctctccaggatgtatattcttatgcctagtgaacacttgcttaaaacttagctatattctggccgggcgcagtggctcacgcctgtaatcccagcactttgggaggccgaggcgggtggatcatgaggtcaggagatcgagaccatcctggctaacaaggtgaaaccccgtctctactaaaaatacaaaaaaaattagccgggcgcggtggcgagcgcctgtagtcccagctactcgggaggctgaggcaggagaatggcgtgaacccaggaagcagagcttgcagtgagccgagattgcgccactgcagtccgcagtcccgcctgggcgacagagcgagactccgtctccaaaaaaaaaaaaaaaaaaaaaaaaaaaaaaaaaaaacttagctatattcactccatgtgtaaatatattaggccataattgcatggctagacagaaatacctgaggctaggtaatgtataaagaggtttaattgactcacaattttgcaggctttataggaaacatggcgctgacgtctgttcaccctctcgggaaacctgaggaaggttaaaatgatggtgggaggtgaagggcatgtcacatggccagaagaacaaacaagagggaggtgccattcactttcgtgcgtgcgtgtgcgtgatggagtctcactctgtcacccaggctagagtgcagtggcgcgatctcggctcactgcaacctccgcctccagggttcaagcaattctcctgactcagcctctcgagtagctggtactaccagtacccgccacgaagcccagctaatttttgtatttttggcagaaacagggtttcaccatgttggccaggctgctcttgaactcctgacctcaagtgatccgcccacctcagcctcccaaagtgctgggattacaggcatgagccagacctcatgagaactatcacaaggacagcaacaaggggatggtactaaaactttcttgagaaagccacccccatcatccaatcacctcccactaggctccacctccaatactggagattactacaattccacatgagacttcaaagggaaaggacaaatatacaagctatatgagtaagtataaattatttggggatcccagaggttaggacaacatctaacggcctttccacattgagtttagttgtaaggttctctccagcatgttttatctgatgtttagtgaggcctgagcgactaatgtaagatttgccacactcattacatttataaggtttttcactagaatgaattcgttggtgtttagtgaggcaagaccgccgcccaaacgccttgccacattccatacatttgtatggcttctctccagtatggtttctctgatggtaaaccaagtttgacctttcgataaaagctttaccacattcattacatttataaggtttctctccagtatgcatcatctgatgattaagcagaattgaacgtactctaaaggctttgccacactcattacatttgtaaggtttctctccagtatgaatactccaatgacgtgcgaggcctgagcgataacggaagaccttgccacattcattacatttgtaaggtttctctccagtatgaattctccgatgccttgccagggttgtagtggagttaaagactttcccacattcaatacatttgtatggcatctctccagtatgtcttctctgatggtacaccagacttgttttatgactaaaagttctaccacattcactacatttgtgtggtttctccccagtaggatttctgtgatatcttgcaagttttgaactttggataaaagcctcaccaaattcattacagtggtaagggttctctccagtatgaattaccagatgtttagtgaggcttgaacgctgagtataggctttgccacaatcattacatttataaggtttctctccggtatgaattttccgatgacgtgctaggcatgagtagtaactgaagaccttgccgcattcgttacactggaaaggtttctctccggtatgacttcgcctatgaattgaaaggtttccactgtcaatgaagaccttgccacacacattacatttgtaaggtttctctccggtatgcattctttgatgacgtgctaggcatgaatagtaagtgaagaccatgccacatttattacaatggagaggtttctctccagtatgacatctcatatgaaccgaaaggtatccaccgtaattaaagaccttgccacacacattacatttgtaaggtttctctccggtatgaattctctgatgtacagttagtaatgagccccaattaaaggctttgccacattcattacatttgtaaggtttctctccagtatgaactctctgatgcactgcaagatgtgaatgttgactgaagaccttgccacattcattacatttgtagggtttctctccagtatgaattctccggtgccctgcaagacgtgaacgttgaaagaagaccttgccacattcattacatttgtaaggtgtctctccagtatgaattatctggtgccttacaagttgtgaattctgataaaagaccttgccacatacatcacatgtatatggtttctttcctgcatggattatatgatgtgcagtgaggcttgagttccgtttaaaggttttgccacattcattacatttgtagggtttgtctccagtatgaactgtctgatgagttgcaagagaggaactttgactaaagcacttcccacatcgattacatttgtaaggtttctctccagtatgaattctctgatgaactgcaaggtgggaacttttactaaaggacttgccacattcattacatatgtagggtttgtctccagtgtgacttctccggtgatttacaagatctgaattttgtctgaagatcctgccacatacatcacattggtatggtttccctcttgtatggactatctgatgtactgttagtagtgagccccgatgaaaggctttaccagactcattgcatctgtaaggtttctctgtagtatgtatcatctgatgattaataagacttgaagacactctgaaggctttgccacactcattacctatgtaaggtttttccctaatatgtgttttctcgtcttgtgtaggtaacgaaagttgcaaaaaatcattcccatatttcctagaaatgttggtttggacaccaggaaaaattctttgaagtggtgaagctaaaaaacaattattaactgtcctctcaatttgattacatccataaattttctctgcagtttgaaatttctgcaattcacccagaccggactgaaaccttaatataagctgattttccatatgcttgttttctacgtccccttgactatgtcgaactctttgaccagtaagattgtttttatgggtcatcggcccttctttataatttatttcaccatctttccattgaaagtcaacttcctgtagatttttccggatttccctgaagtaaaaattttcagtgtcatagctttcatgtccttccaacatcactgcttggaatttttctcctgtgttactgttctgtattggtggtaattccttgatcacacatttaggagagatacctgcaaaatataatgaacatggggttttaaaataactattattggtaaatattattttatactgaaaacacactacgctaaacataatgtttatactagcaagttgtgaaacttttctaccatgatcttctatttgtagaaatgcaaaatgaatagaattctatagtaaagaaaaagtgattacatgtaatttaaatcaattttaggaaagcctagtttcaaacatccttcgaccaaaagactcatgttatgcaaacatatatgagcaccaaaacaagtattttgcaatcgctgaccccaaatgacacaccaattggcagtaaacatatggctccctcataataggagagaaaaaaagttacatatatttatttcatacaaatgaatgccaagcaacagcaagatatactgtaatggtaaatattaactaataaataatcataatataaattaattaataaaacattctaatagcctgtgataaaaccagcaggtaaataatgaacaaccacaaaatacaaatctatagtatgaaattctaaacaattctccatcaataataagcaagaatttatattctagaggcagtatataactagaaaatatgttgagatcactggcttttaaagataaaagaaaggtaaatatgtctatggccataccaccgtgaatgcatctgatcttgtctgatctcagaaactaagcagtgtcagaactggttagtacttggatgagagaaaggtaaatatataaaataataaagaataaaaattggggacaggtcagccgggcacggtggctcaagcctgtaatcccagcactttgggaggccgaggtgggtggatcacgaggtcaggagttcaagactagcttggccaacatggtgaaatctcgtctgtactaaaagtaaaaaaaatcagccgggtgtggtggcacgtgcctgtaatcccagctactccggagcctgagacaggagaatcattggaacccaggaggcggaggttgcagtgagccaagatttcgccactgcactccagcctgggcgacagagcagtctcaaaaaaaaaaaaaaaaatggagacaggtatggtggctcagacctataatcccagcattttgagaggccaaggtgggcagatcacttgaggccaagagtttgagactagccaggccaacatggtgaaacctcatctctactaaaaatataaaacattagccaagcgtggtgatgcatgcctgtaatcccaactactcaggaggctgaagcacgagaatcacataaacctgtaagggggaggttgcagtcagccaagatcacgacactgcacttcagcctgggcaacagagcgagactgcctcaaaaaaagaataaaacttgggaaaggaaatcagaaatctcagttatgatttcatgcctacaactatgtaacaaacaacagagcaagtccctatgtattcattgtctttttttgcttttggctgagatggagtctcactctgtcacccaggctggagtacagtggcatgatcccacctcactgcaacctccaactcacaggctcaagcgatcctcccacctcagcctcctgagagctgggaccacagatgcatgccatcatgcccggttaatttttttgtagttttggtagagatgaggttttgccatgttgcccaggctggtctggaactcctaagctcaaacaatctgcccacctctgcctcccaaagtgctgggattataggcatgagccaccgtgcccagtcctattcactgtctttattatccagttccttggccacaaaatatatatgatacagagattgtacttggaaaatgcatgaactgagataaaagacaacaccgtttggaccaaactgcaaaatgaaaacttacagatacaatgtagactgctctgatataaagacttatgtctgccaaaattcctatgttaaggccccatcctcaatgtgatagtatttggaagtgtggtctttggaaggcaattaggtcaggatggtgcatagaacttcaggaatgcaattagcagaaacgtgaaaaagcctctgctttttgcatgacaatctctctgccacatgagaacacagagtcagccatggcacaccagaaaaaagtccacaccaagaaccaaagtggctggctctgacatgttgaactttgcaccacccagatctgtgaaaagtccatttctgctgtttaaaccaccctatctatggtatctgatatagctagtcatgctgactaaggtaaagccaatatgctatctcattataaacatgaaacaatgttgatacacgttattaaacaaatttgtgagtctgtactataaaacatgcaatattctaagctagctaacagcattaacttgtttaaaaagtctttaggtaaattatcactatttaacaaacaagcacactaaatatgcccacaggatttatgtatctatacccaatttacaaagaaagtaagacacaagaacctgggtttgcaagatcaaacatgttttttaaaaacaacttcccaaacaagcagtgcagataacaggtcaacccaaatatcaagagtgtagaaatacttcaagagccattttgtgtagagcacctgattctgtcgctgttcagggtgccactatgtaacccacatggacctaggaggactgaacaaagggggcgaatgcgggaataaaagacaagagacaaaagagtatatttggaagaaggggtcaggggcaccttgcctgtagtggacaagggccctgagctttacacagccgtccgtatttattaggcaagagagatagtgagaaggatggtggaagaaggggtcagctgcgcagtccagagtaggcttgcaagactgcattcctcaaacaacaggctctagatatggcagtagataaccctggcaccaggaagtgattgcctccagcaaaccttctgtcagcaggagcagtcatgagtttgcccacatcctgcattcatgataaacagtttgctgtttgatcatatagcctccagtggaatgctgagttggtcacgtcccacaggctttggctccctgcaatgctgtgttgccaaaagcattattcagccatccgtcatgaataacgaacggtatctgagtcatcatcccctgcacatattgatttacgcagtgttatcagacagtggtcaagtgaatgagtaggggtcaccccttacagagtgagagtagcatgggaggtgagggagttctgcaataatgggagtataaaattaatatgctagtcagtaactgggtagtccatctggacaaagtaatatgttaggaaaggcccaggaggacaaagggcaagaggggagatcaaggagtaatgagcatggagcagcagggtttgtgcttgaagagctgtgggaatagaattgcacaagaaacagctaaaatcctggctttggaagaaaagagaaactaatgtagaggtagtattgtactgactaatacttaaacatgagaattatactatgggtgcaggacaacaagggaagacaattaaaaaggaggcggtgtgatgatatgggaagaaaacagatttatgtctctataatatttgctatgaaatttatcaaactgaatgtcccataagttctatttccaggtatatgctcaacaaccctacatatcaagagatatgtgaaagactgttcttacaattcaatccttaagaaaaaacctgaaaatggccacgaagaggagatggatgaattcattttgtacacacacaaagacaccacaaaactttactgatagtacaagaacgttaaggagacggggtgcagaatgaggacccgtagcacaacaggcaaagatttgagaaaacaaagaaagcaggagactcttgtcaaggtttaaatatatgttaatggagacacagtatatacgatgaaagtatcctgggatatcaaaaacacaacatggaagcagatctgtaaaaagtcatttctgtatgtaattgaagttaagctgttattagtttaaaataggatgttataaatctaaagtgttttctgtaattgcaacggtaaccacagagaatgtatagaagacacacacaatggaaataaaactatttcaggaaaaaaaaatcaactatataaaaacgaaggcagtaagacaaacagaacaaaaaaatctaaaagagatatagaaagcacttaacacaatggcaatataagtccttttctatcagtaattacattaaatgtaagtgtttatactccacagtcaaaagacagagactggctgaataaatttttaaaactggcttcagctgcacactatccagaaaatactcattttaattcaaaggacacacataggctgaactgaagggatgaaaaaagatatgccctcaaaatgttaaccgaaagacatcagaggtggctaaactgatgtcagccaaaatagactttatgtcaaaactggtacaagagacaaagaagggcattatataatgattaaaaggttaattcactaggaggatataacaatatgtgcctatatagagatcctcaatatgtgaagcaaaattaacgtaactaaagggagaagtagttccacagtaataataagagacttcaatggcctatttttacttataaataggacaatcagacagaagaaaaacaaggaactagagaacctaaactatatatcaagttgaacctaacctatatatgcataacacatcacccaaaaacagtgcaatacaaatttttcagaactgcacatgaaacatttttcaaaagaaatatcggaaaagaaaaaaaattttaaactttttaaagactaaaatcgtaaagcataacttatcccatcataataaaataaaactagagatcaacagcagaagaaaattagattatcaacaaatatgtggaaacaacatactcttaggccggtgtggtggctcacgcctgtaatcccagcaatttgggtggctgaggcaggtggatcacctgaggtcaggagttcgagaccagcctggccaacatagtgaaaccctcagccaagcatggtggcagatgcctgtaatcccagctactcgggaggctgaggcaggagaatcgcttgaacccaggaagtggaggttgcagtgagccgagattgcaccactgcactccagcctggacaacaagagcgtaactccgtctcaaaaaacaaaaacaaacaaacaaggaccatactcttaaacagccaatatgtcaaattagaaatcacaagggaaattttaaaaatctcaaaacaaaggaaaatgaaaatagaacataccaaaacttgtgaatgcaggaaaaacagtgctaagatagaaaatctgcagatataaatgctaacattaaaacagaagatatccaatggaacagaataggaaacccagaaatacagccacacacctacaaccaactgatccttgatagtcaaaaaaaaattgggaaaagacattctattcaataaagggtgctagaaaaactggctagccatatatagaagaatgaaactggactcctatctcttgtcatatacaaaaattaattcaagatgaataacgacttacattaagtcttcaagctacaaaaattctagaagaaaatctaggaaaaacttttctggacaaaatacaagttgttgtttttttttcttttttttttttagagacagggtcttgctctgtcgcccaggctgaagtacagcagtgtgatctcagctcaatgcaacctctgcctactggcttcaagcaattctcttgtctcagcctcccaagtagctgagattacatgcatgtgccaccacacccggctaatttttttgtatttttagtagaaacagggattcaccatgttggtcaggctggtctcgaactcctgacctcagacctcaaaatgatccgcctgcctcagcctcccaaagtgctgggattacaggcatgagccattgctcctggcccaataccagttttttaagagaatttattcttcattgcttgagcatcacgaaaaaaatatataggttttataaatagtagagaagtccctgaagtgtaagaaatgggctaagtttaaaataaagttagatttttaaataatgattcagtataacatgatggacatgaatgtagataggagaatagttattataatacagcatttgttccaagaaagaaaaaaacagtgcaatttgaacaaaacccagcaagctatatttaggaaactgaaacttactacagaaaagcaatgtatgttatataacaaagaacgatcaatctattaaatggtatttccacaattaagatagtaacttaaaaaattatgctcaagatattaaaaatttccaacttaaaaactgtaatcaatttaaccgacaaatatatactttcatagtaggaattaagtcaggtgaaacagaagtaaaaggaataactgatactatcaatacaacattatggagtttctgtaagttttagggaaactgctgctgagctataccatctgtactaaagaaggaaatcttgtaaaatacataaaacaatatgcattccccaacacaacactaccacaatagaaacataaaacaaagaaaactgagtatcctcaaaaatatggaactgattaaataaataaaaacaaagttcatttataatacatgaaaatgcatcagatgaaagcaatggttgcttaaaacgaattttgtggacttaaaaaagataagcctcattcaacttcattagcttcctcaagatcaaagtcgtactcactataaacaaaaatactggggaagaaaagtgtggcatgagcagtggttcaggcaacagccctgcagagatgaagctgtgaacctggacaatgttcttcccgggagaaatttttttttttgagacaaagtctcgctcttgttccccaggctagagtgcatggcgcaatctcagctcactacaacctccgcctcccagatttgagagattctcctgcctcagccccccgagtagctgggattacaggtgcctgccaccacgcccggctaacttttgtatttttagtagagacggggtttcaccaagttggccaggctggtctagaactcctaacctcaggtgatccacccgcctcagcctcccaaagtgctgggattacaggcgttgagccaccgtgcccggcatgggagaaattcctacaccattcactgctagctcaaaaaagaggaccattagtatatgagatcaacattgccacagtacccttgaaagatacttttgtgacatttctcagaaaccaggctcttgtgatggtctctatctgaatatcatgacaaatgctgatcattctactctggctttaatagttacctctgtatgtagcaagatgatgttaaaactcattactcaaagtgctctccttcaaaaattttctcttacccagtaaactcactccatacaatagtccacaagatattcataaccccaagatgggttatcacagcaggaaaaaagcataaaatgtccgaccctagaaatgcatttatccaaagcaagtctcagaggcaaaaaatcacacaaacataaaagagaatgcaagatcagaaagagccaaggcataaacaagacagagaaaaacacaggaattggattgtgagggatcttgaaatgagacagtgctctgtccacagatcccaaactaagagtgtgaagacagagatacgctccctgtgtaggactaagaataaagagaggacctttgtgtcaactgtctttacaattcttatatgtaacaatctcaggagacccaactcattcccgtgtcacaaacccaagaagagtgtccaaagaagaactaagaaaatggctgagggacctgaacaggcagagagggctgaagatagtccagttctaggaccccagcttcaaaggaagggcaaccaatgtttcctcatctcctgaccagcactttcaagtataggaaatggggtggaaccagaaaagttccaggcaccaggactatggagccctcagctccaatctatatggatcagagaactgaggatcagatggaatcaagaacaggaggagagaccacacgggaaagagacttctttgaaaaggcccttcccatgccacagagtcaaagcatcagagttcacacaatacagatgacactgtggtccatcataacagtcttgtactttgctctgtttgagctgcagcaacccctggagagtgaaaggtaaagttatacgtgtctggaaagcaaagtgataagcaggaaagaagaaaacttctggagctcacagaaaatcaaatttgtttccccacagaactctcccacttgcagagtcttacgcacacaatttcatggtaccgcttccattgtgcccatctgagctcttaccggtgatcacgcctttcatgcattccccacagtttgggttcctcgctattttcacttggctcaccacagtccagggctctttcccttgctccaacatggagataatattcaggtcaggaagacagagtcctgcttataaaaaaagaaagaagatgtcccacggtttttccagaacccagcctaatgtctaggtagaagagaaaacactgcagttgaatctacaaaatatttcacaaactcatccattgattgcctccttctgaatgcttagtgaacactgtaagatgaagatatctagctctctcccaagaaatactgaatcaaaaacacagggataggccaagcatactggctcaagcctgtaatctcagcactttgggaggccaagacgggaagatgacttgagcacaggagttcaagatcagcctaggcaacagagtgaaaccctgtctctacctgggcatggtgttgcacacccacagtcccagctacttggaaggctaaggtgggaggatggctttatcccaagaagctaaggttgcagtgtgccaagatcacaagatcacaccactgcactccagcctgggtgacagactgagactgtgtcaaaaaaaaaaaaaaaaagcacaaggatagaaaacaggaagaacagggaattggatatattaactccgccataaggttttacacgtacctcagctctggagtcaccactaatgtacaaagaaggaagcagaatatccatagaaatgggacagttaaaggccagatgcagcattatgaagctttttatttgtgaatcaacaaggcttcagtctctgtcaaataatgtagggcctcacaagaaacacaataaggaaagtacaaaaatgcacaagggaagatcctaacttctggaggaaaactatcctcacccaggaagccgaggttcctgtagttctccaacatcacgtccctgtacaaagctttctgaacagggtccaggcatttccactcctcctgagagaattctacagccacatccctgaatgtcaaagatccctgaaatgaaaaacacatttcaatatgagcagtgggtgagctcttatctttacataaaatgagaagaggagagaactgtcacatcaatttgattgaagtgtgttttgacatatccattaaaagtatctgtgagataattacgtctccctgattttgggttttataaaattcaataggagattaggatattatctaaatcggtgcacatttctcacttttgtggacaaaataagaaataaacacatggttatccctatgaaagttttagatattacatttgttacaccaagtgaggtgtccagatgagctagaatacaagtggtgtcttcagagatgacaatgttcttagtggctttaaagaaaggtcagaaactaaaaacagcgatgacaagagcaacagcaagaactaaagttttggaacactccccatgtaccgggcattacttcaaaggatttacgtgttctaactcaaatgatgacataatcacctatgacagaaatatttcttcccatcttactagaagacaactgtgtcacagacaggctaagaaagtcacctaggtcaacaacctgcaaacagcagagcaagcacctgaacccagatgtctaaaaattagagttgaatcaacagaatccgacagttatattacagagtatgtcctagtctttctgtgtggctataacgaaataagagagactaactaacttatgaacaacagaaatgtatttctcatgattctgctggctggggaatccaagatcaaggtgtcagcaggactgatgtcgctgagggctaatccctgcttcgaagatggtcttgttgctgcataggggacgaatgctacagtatactgacagagggttgcctgagaaaacttgaagcaagttcaagattaacttggaaccgcataaaggatcattatataggctaggcgtggtggctcacacctccatcttagcaccttgggaggccaagatgggtggatcatgaggtcaagagatcgagatcatcctggccaatatggtgaaaccccatctctactaaaaatacaaaaattagctgggcgtggtggtgtgcacctgtagtcccagctactggggaggctgacacagaattacttgaacctgggaggtggaggttgcagtgggccgagatcatgccactgcactccagcctggagacagagtgagaccccatctcaaaaacaaagaaaaaaaagatcatcatataagcacacagaagcacacacataatacattactattcataaaactaatccattcacatgataatatagaaggcaattttaaaaattaagcaaatcactgggacaaagaaatatgtaaaaaagtttttataatcccagcactttgggaggccgaggtgggcggatcacaaggtcaggagatcgagaccatcctggctaacacggtgaaaccctgtctctactaaaaatacaaaaaattagccgggtgtggtggccggcgcctgtaatcccagctactcgggaggctgaggcaggagaatggcatgaacccgggaagcagggcttgcagtgagccgagatcgcaccactgcactccagcctgggtgacagagcaagactccatctcggaaaaaaaaaaaaaaaaagtttttaaagaaaaaacattttaaggccatagaaacatttaagatataattttcaatagtgttcccaagcctgtatcttatgtagagaaaagaaaaaaattaaaataaaaccaagtaaataatttcaactgtgaaaagataataggctgatttatgaaatgatgatgttgtaaataaaaaccaaagcatacaaacatttaaattaactgaaataagacgctatctctcaatgacatattttttggatgactttttaaatcattattcttagacatgtatgttttagcatgcttgggacaatgaaaatgtataaattgtatttcatttactttgtacttagtacttcatttacttatttacttagtacttcatttacttatttattttgtacttattcaatactaggctggagaaaatggtacaaaattttaaaagtatataaacttttattacaattactattaaatgcctatatttaaatatctaagtgcaattttatccagttaaatttagctacttatgcattaacaaaagccaaatggagtttattcgtttattccaccaataaataaaacagtgattcaagattaggtggtttataagtgtaatacattaaaatttaacagattaagatagaaacaatatgtattgcagcagtatatgcttgcataaattattagaaaatttaaaaatcatgttgcaaaggaaatctgtaaaaaaaaaaaaaaaaaaaaaacccaaaaactgttaaggaaaaatatttcacccaacaagtgaaacactggattcatttcctctaaattaagtaagagaaaagggggtttttcatttcctctaaattaagagaaaagggggttggccagacctcctgtcattcaccactgcactggatgtctgagcagcagcaaagagaaaaggtgggagggaaaaaggcaaggagggggtagagccaaagagttagatctactaaaattaagagataacatgattgtggccgggcacggtggctcatacctgtaattccagcactttgggaggccaaggcgggaggatcacctgaggttgggagttcaagaccagcctgaccaacatggagaaatcccgtctctactaaaaatacaaaattagccgagcatggtggcacatgcctgtaatcccagctactagggaggctgagccaggaggatcgcttgaacctgggaggcggaggttgcggtgagctgagatcgcactattgtactccagcctgggcaacaagagcgaaactccatctcagggaaaaaaaaaaaaaaaaaaagagataacatgattgcaacccagaaaaagaatgtttaagtatacaagctaacaatgctaacaatgtactgaaataatcttcctactttagtaacactaatttaaaaacaacacacacacttctaaattttcattagcatatataccatggcacttaagtacaatacattttcagaattatgtgaacaaattataaaactacactgagtgatgtcggcaagataaaggaacaggaatccccaaactctccagtcaccacagtgaaatgattttaacaacaattcatggactaattgcctcggggataaatccagaaaacagttaggaggtttctacacctcaggctgacataaagcaaacagtatagaagctctgaaggaaaatttgaagcatccacttgacagagatccagcccctgccatgcactggggtaacagaaaagaaacccacaactcccaagatcatctaggggatggaaaggagcagaatatctgtccaacttcctgacttttcagatgaccaactgatgggctggtttctctcttcctgaatataagcactgacaagaacaaggtgaaaggttaggggccactgagaaaaaggatgatttacataaaccagtgtgtgcagtaacacagacaaacgctaagtgcatatctagtactacagcttactgtagcaccaaagtctgcaatatcaaagacagacaacaggggagcttctgggtagaaactagcaaacattttcaatgaagagatgacaagcaaaggcccagagaggacaaaatccccagccagaaaaggtgtggaaggtctccacaatctagctgagttgactccagagtgtcctccctgaacaaagcaaccacccaaaactggggaggtagatgatttttaaaatagggaagtgccaaaagaagataataaaacttacaaagaaataggaaaatacagtccataaaaagaaaccaattaagtctctacaaacctacactaaagaaatggtgatttaaatcttggctttgaagaactaaaaggaaatggggatcaccctcagtatatgcagaggattggttccaagattccctaaggggaccaaaatctatggatactgaagtcccttatataaaaaggcatagtatttgcatataacctacctatatcttcccatatgatttaaatcatctctacattacttataatagctaatacaatgtaaatgctacataagtagttgttatactgcattgtttaggaaataatgacaagaaaaaaaggaccatacgtgttcaacacagatgaaaccatccatttttttctggctatttgtagttcatagttggctccatctatggctgcacgagccatgaatacagagggctgactatatgtgaattaccaaagaatttgaaatagcagccacaagaatgctcaatgagttaaaagatagcacacacagacaagctcacgaaatcaggaaaactatatgaactatgcatgcaaagaagaatatcaacagaaatagaagctataaagaaaaatcaaaaagaaattctaaggctgggcaccgtggctcacgcctgtaattccaacactctgggagcccaagatggggtaattgcttaagcccaggagttctgagaccagccagggcaacatggcaaaatcccatctctacaaagagtacaaaaattaggcaggtgtgatggtgcatgcctgtagtcccagctactcaggaggctgaagtgggaggttcatttgaacccgggaggcagaggatacagtgatccaagatcgtgccactgcactccagcctgggaaagagtgaaaccctgcctgaaaacaaaacaaaagaaagaaaaaaagtcgagttaaaaatacaataactgagttgaaaaattcgctagatgaattcaacagctgacttaatgaggcagaagaaggaatcagtgaactcaaaggggattttgacacggaggaaaacaaaaactataaaaaataaagaaaaataaagagagtctaaagggctcatggggaaaccatcaagcatcaagaacgtatgtatcctgaaagcccaataaataatgtgaatatacctaacattactaaactgtaagcaaacaaacaagctttactgaaagacataataaagatatgatcactgactgacaaactcaattcttataggaagatgtgatggtgacaagacctgcgactgtaaaaattcatggccattcaaacacaaacaaaatatgtgggaatttaataaaatgtgactgttgtataaaaaaagaaccaacaaaattttggaaagaaaatggagaggtttgccaatcttcatatgaacctattatgacatttataatctgaaactttaaaagcaatcaaatataatctacaaaaagatatacacaaaaattcaaattaaagattcaatcaaaaaaattcatgcaaagaaaatgtaagcaagaaacatgagattttaaagaaacttcatattttataatcacaccgtgagccaggccttccagaagataaaacaaacatttacttatttttgcttttgtggtataccatcctaaaagaagcaatcattctttgaactgccattgaagtaaccctcagacacttgtggtgaagacagcatgcacagaggaagccacagtgacattctttgcaaaaatgaaaaattgtaaaagatccatatgtcttcatttagaaattgctccaaagaggatgcaaaatacgctattagtgtttattaacataaaaacatgtacatttcaggctgggcacggtggctgacacctgtaatcccagcactttgggaggctgaggcaggcggatcactaggtcaggagatcgagaccatcctggttaacacggtgaaaccccatctcaactaaaaatacaaaaaattaactgggcacagtggtaggtgcctgtagtcccagctactcaggaggctgaggcaggagaatggtgtgaacccgggaggcggagtttgcagtgagctgagattgcgtcactgcactccagcctgggcgacagagcaagactccgtctcaaaaaaaaaaaaaaaatgtacatttcaaaaacttgcaaaatacagcagaacattcacttaagaattgttttctaaaatctcataatgacgtgtaaatgcatcttgacacctctcactgactcttgccacagaacttacaatagtagctcctcaatgaaacatgaggcatggtggagaatgtgacagggaaaaggaacctgggttcctctgggtgggtaattgaaagagtgattgcctcttctaggatggtgcatttcctattttggtgaatctggcaagattccccactaccccaagttcaagggtgccccctcccaccaatgacacatgacatgtcccactctttaaaaaaaaaaaaaaaaatactactatgttcttttttctctttgaggatctaaaaaaaataaaaattctttgtatttccattttccaattccttggactgtgaggacatttcattattttgtggaaatcaaaataaaataattttcattttatgctcaattttcttttactgcattctaggagctatttcatgttctgtagttaaaagtttttaaatatatatgccttgatgttctttttttaggttatgaagggtgttcttgatgccctgttttttacttgtttgcttacaaattttattgtgtatatttaaggtacacaatatagcaaggtatagatagtaaaaaactcacgacagtttaacaaattagtatatccgtatctcatagttaccttttttttttttttgcttttgtggcaaaaacagctaaaatctcatttagcataaatttcacatataataacacgttattccctaccatccttatgttgcatcaccttcttaatgtctaaattccatctctgcttggacttttaccacaaaacaaatatatatatcatgtgatgtttaaaataaatgtaatatttaataataattggtggaatgacagaatttggctccatcttctctgacatcaaaaaagtttggctcttacatctgagcaaaattataaccgttttacaaaaaacaactgccggtaagagtcccagcaggaacaccacattctctgtgggatggatatgctgagaatggctaaattaatctgacattcaggttgatttcatattttaaaatcaatgatggaataaaacaacctctatcactgatgtctgtacctagttttccattccattcccggtcattaagattgtggagttagaaagagtgactgattcattatagcttcaaatgtggtataaaatcaggcagaaaagatctccccttagaggcatcttttcaagaatttatgaggtatttttgcatattaacatgtgacttccacatacagcttctctactcctggtctactgagagctgacagtgcattcagatgttgcccctaaacaatctctgctgcccaaaagctgacaccacagaactcacaccctgtctccatccatgtctgggtgtgagcccttcccaggaccatgcccagtggagcctcttcccaagctcatgtcactgagtcactgtgagatctggaatctaagtgcagaagagagggactgaaggaaggcatgggtgagtgcgagcaaatgtgtcaggcaggatacttcagactcagagaagatttgcagctccaatgccctgcatttcaaaaagggaggagacagaacaatccaccaagattatcactttacctgaggaagagccatccctggctccttttctttcttctttctctcctgggcctctctctcagtcaatataattaattctttaaaagtcaaatctgaaagtcaaaaatatgttgtttaatccttggaaacaacacattcctttctgtgccacaaccatgcccacagggaaggcctcagcatgtggagagacagcccagtgcaccagggggatgcaagcataataaactcctacacaaagaccaagtaagtttttcacccttttcttcagaacttgttcccctcccagagaagcccccacacaccctgcaacagtggggagctgggctggactatgcttcccttcaggacacagacccatccctgatcaaaccccatacagagcacagccccctcacctccctgtggatcacaggctgagctcagctctcagaaacagaagacacaaaggctggacgctcaatgctggatacaaattagaatcaatttgggtactttaaacaatatggaggttgagtccatcctacctactggaagtggaatctatggtaaaagggcacaaaacgtgtatttgcaaactgcctcagcacgctaatgtgaagccagggttgaacacatcttaaagggggcaagactagcacagccccatcctcccagctctgctgtccccttggggcttcactgttaccagtttgtagacagtagaacacaatggaccagaaacacagagacacataatatgcaccaggggtggggtgagggtgtggctggagtgttaaatggtgagaggagggtgaggcacagaagtcccaatggagaaggtgatatcagaacaaagacctcaagaaggaaggatgtttgcacctgcagctgaggggccagacagcccaggtagaggccctgaggcaggagcaacctcagcccagggaacaggaaagaggcctgtgtggctggagcagagggagcaggaaggacacagggaggagatgaggtcagagaggttctggggagcagattaggtagagatgaggtattcaaacatctttctcccacagctcacagtaatttcagaaactatgcatttcctcaccctttttaagtaaacataacttttctttatcacatgaattaaagcacttctttttaatgtcatgttttctctgtttcaaatatatgctgacatgtaaagctaaagccaggaagtacagggtcaccatcatctgagatgtgcaggagtgcaggggaatgtacttggtgagttcaggcaatcacttttggtggagatacctgttagatggctaagcagagagaggagaggacaaaaggacacagaattctagagttcaggggacaggtctgcaggggacatggagacgtgtaggtgggtaggtgggtgatatggatcagctctgtgtccctggcccaaatctcacactgaattgtaatccccactgttactggtggggcctggtgggaggtggatggatcatgggggtggatttgtgatgaatggtttcacaccaccccttggtgctgttcttatcatagtgagttctcacgacatctggttgtttagaagtgtgtagcgcctcccccctcactctctcttgctcctgctcccgccatgtgagacgcctgttcctccttcacctgccatgactggaatcttcttgcagcctccccagaagcagatgtcgccatgcttcctgtgcagcctgcagaactgtgagccaattaaacctgttttctttataaattacccagtctccagtatttcattatagcaattcaagaatggactaatacagtggggtttaaattcataagatgagatgatgaggaaagacagtgggtgtggacagaaacaagaagaggttcaaggactaagccatgagtcattcccacattgggaaacattcagagtcaggacacagcagcagaggaaagtgtgaaatggtcagggaggtgacaagaaaatcaaatagctcctgacaggcaaagaaagagtaaagcaggaaatgaaatacattggatttagaaatggggaggtcactggtgactctgaaaaataaagttatcagtggaatggtggatatgaaagtttcatccaatgcattcaagacacaattggaggcaacaagtgaagacagagactctgaacaagattgtattgtattatggtcttaaatgaagcacagaagaggggtactcactacaggcagaaacacagttaatggtatgttttgttttaattagggcacagtggaaggaaactagaggctttagggtctgtgtgtgtgcatgcatttaatgggcaatacaccaccatcagtaaacactgtttaaagtaattctgtagaagtaaaaatgaatgacacagttaaacaaattttatggaagcccaaagtattttcgttgttttctttttaacttatattttaagttcaggggtacatgtgcaggacgtgcaggctggttacataggtaaatgggtcatggggatgtgttgtacacattatttcatcatccgggtattaagcctagtattcataagttatttttcctgatcatctccctcctcccaccttccactctcaggtagatcccagtgtgtgttgtttccctctatgtgtccaagtattctcatcatttacctcccacttgtaagtgagaacatgcagtatttggttttctgttcccgtgttagtttgctaaggataatggcctccagctccatccatgtcctgggaaaggacatgatctcattgttttttatgggaaggctgttgttttggactagcctcccgaactaccagaccaagccagaatgaagtctcttgtgctgagtgccacattatcaaactgaaccttgaaatgggccaggtttaggggaaaaaaaactccaaaaaataaacagagaggcccggcgcggtggctcacacttgtaatcccagcactttgggaggctgaggtgggcaaatcacctgaggtcaggagattgagaccagcctggccaacgtggtgaaaccccgtctctactaaaaatacaaaaattagctgggcacggtggtccatgcctgtaatgaccccacccccgaatactggcaccactatctactaaaacagatatcttcaatgatgcacacatgccccaatgagaccccaacatcttccaaggaaactctccatattgacatttagataatgcatccaaaatgcatctataaccatcttaacgtgcagcccaaaatactccaaaaaaaaaaaaaaaaacaaaggtagcccccctaaatgatctctgtgattttccagataatacttcggtaagttgcatgattcctgcactcccaaaagaccccgcagaagtcaccatgaaaagtgcttatggcagtacagttctgggttccacgctctcaagaccaacgaaccaaccctccagctgcccaacctccctgtggactccacttaggccttgcttctcacttcagttgacgatagaacaatatgagtttggattgtatgggtccatttataaaagaatttacttcaataaacatctgaaaaatattttgaagacttgcaacaatttgaaaaaactcacagatgaaccatgtaccctaattaagaaaaaggtatgccagaaatgcataaaatatatgtaactattagtctattttatcacttagtaccataaaacacacacaaatctattctaagttaaaatgtaccaaatttatataaacacctctagactgtatatggttccatctacagtcaaaataaatgtaaaaaaatgtaaagacgcagtattcaatcataactgcattaatgaactgtactacatactgaacttctataataatttcatagccacctcccattgctattgtggtgagctcaggtacctgcttaatgtgccccgtgatgttaatcatctccatgtgaactgttaatctctctagtaaattgcagaccgcagtaaaaattgatctctgtggttctggcacatttttcattgtttggtgcaatacgataaactctgaataacaacacaggacccatctgaagtgccactagtgatgctggaagtgctcccaagaagtagagaaaagccatgacattataagaacatgttgacttgcttaatacgtaccatagattgaggtgtgcgattcagttgcccgccatttcaagataaattaatctggtgtaaggaccactgttaaaagagaaaattcatgaagccgtcactgcagctacaccagtaggcacgaaaacaatgtactttttgctaaataccttttttatctcatattgaaaatgcagctttatacaggggcaaaatcactataatgaaggcatacctgtagactctaatatgatttgagaaaaagggaagttattttatgacaactttaggaaggtaaaggatctaaagctggagagtttgatgccagcaaaatatggactgataatttaagaagtttggcttaaaaaatgtcaagataacagaagcagccactccaaccaagaggcagtagatggggtcccaaatgctatgaagaaaatcattaatgagccaggcatgattgctcacccctgtaatcccagcactgtggaaggccaaggtgggcaggtcactagagcccagaagttccagaccagactgggcaacatggcaaaaccccgagtctactaaaaaatacaaaaaaaaacagccggacatggtgacacacgcttgtagtttcagctactcgggaggctgaggtgagaggatgccttcagcccgggaggcggacattacagtgagccgaggtcacatcactgcactccagcctgagcaaccgagcaaaaaataaagaaactgtggcattccaaaatgatccatgcacaaccactcataatcccacttccaagtgcttctgccagacctaagaaattcctttccaagagttccacataccccttgctcttataaccacacttgggacaggtgcacacaccataccatggctcatctgaaggcccacccttgctttctggagccttctatggactcccctccattttcccccatttttctacctctcctccatgcatgcatgaacaaactaggctaaaaggtacaggatctctgggcacatgcaacacagcaggagtgtacacaaactgcaaactgaaggaccctgggccttcagtatgaagaccacaaagttgggcctgctgagaaaacttgccagcaagtgctgacaatattaagtctagtttaaaggcagctgggcattggctagattaagttcagtgaggatgtctcagaagaggggccctaaatctttctatacactaaagacaaaatatctgaaaaaagaaataaagaaaacagtcctatttgtaatagcatcaaaaggaataaaatacttaggaacagatttaaccagtgaagtaaaagatctgtacactgaaagctcttaagacactgataaaagatattgaagaggccaggaaagtggctcatgcctgtaatcccagtgctttgggaggctgaggtgggaggattgcttgaggtcaggagtttgagaccagcctgggcaacatagtgagactctttctctacaaagaaaagaaattagccaggtatggtggtgcatacctgtagtcttagcccttcacccaggtatggtcgtgcatacctatagtcttagctacctgggagcctgaggcaggagggttgcctgagcccaggagttcaaacctgcagtgaggtatgatcgccccactgcatgccagcactccagcttgagtaacaatgtgaggctggtctcttaaaaaaagaaagaaagaaagaaagaaggaaggaaggaaggaaggaaggaaagaaagaaagaaagaaagaaagaaagaaagaaagaaagaaagaaagaaagagaaagaaagaaagaaaaaagaaaggactgtagagagccaaaagccaaagggtcatgaccaactctgcattccactgaaggctatatgattaaacagcaaactgtttatcatgaatgcaggatgtgggcaaactcacatctgccctgccgccagaaggtatgctgagtgcaattactccctggcaccatgctccttgaggttatctactgaaacatctggaggctactgttcagagaatgcagtcgtgcaagcctgcaccaagtcaagcagctgactgacaaccacccgcttctccctatctcctttactcaataaatatgaagggctctaaaagctcaggactcttgctcactagaagcaaggagcccctgaccccttcttccaaatatactcttttgtctttgtctttattcctgtgtccgtccccctttgttcagtccacaggcattggggctgcaacaaaggataaaaaaaacattgaagaacacacaaagaaatggaaagctatcccatgttcatagattgtaagaatattttaaaatgattaaaatgtccatactaccaaaagtgatctgcaaattcagcacaatccctatcaacactccaatgctatttttcacagataaaaaaagaaaaaaccctaaaacttttatacaaccacaaaaaactccaaagagccaaagcagtgttgaaaaagaacatgctagaggcatcatactttctgatttcaaactatattataaaggtacagcaatcctaacagtataatactggcataaaaacacacagagaacaatcaaacacaagagagcccagaaataaacatgcacatatacaactagcctttgacaagggcaccaagaatatacaatgaggaaaggacagtctcatcaataaatcctgtcgggaaaactgtatattcacattcaaaagaatatgaaactggacccttatctcacactatatgcaaagataaactcaaaatagattaaagatttaaatatatgatctaaaaccgtaaaaccccagaaaatagaaaaaaagctccttgacattgatcttggcaatgatttttttggatatgacaccaaaagcccaggcaacaaatggtgggactacatcaaactaaaaagtgggactatgtccaactaaaaagtttggccaggcgcagtggctcatgcctgtaatcccagcactttgggacgccaagacaggcagagcacttgaggtcaggagttcgagaccagcctggccaacatggtgagaccctgtctctactaaaaaattagctgggagtggtggtgcaacctgtaataccagctactacgggggctgaggcaggagaatcatttgaactcggaaggcacacattgcagtgaactgagattgagccaccacactctagcctgggcaacagagtgagactccattttgggggtggggtgggggaggggcaaagctcctgcacaccaaaggaaacaatgaactaaatgaaaaagcaatttgtaagatggaagtatgtatctgcaaaccatatatttaataagtggttaatatccaaaatatataaaaactcctacaattctacagcaaaataccccaaataatctcaataaaaatgggcaaaggacctgaacattttccaaataagacatacaaatgaccaacaggtatataataagatgctcaagatcactaatcatcagaggaatgctaatcaaaaccaccataagctatcacctcatacctcttacgaaggctattttaaataggcaagagataacaggtgttagcatgatatggagaaaaatgagcccttgtacactgttgctgggagtgtacatcagtacagccattatgaaaaacactatggacattcttcaaaatattaaaaatagaacaacaatgcaatccagcaatcccatttctgggtatatatccaaaggaaataaatgaaaccagtatctttaagagacatctaggccaggcatagcagttcatggctgtaatcccagcactctgagaagctgaggcgacaagatcacttgacaccagtagttagagatcatgctggacaacatagcagagaccatgtatctgctgaaaaaacacagacaaaaacaaaaaaatggctgggtgtggcggctcacgcctgtaatcctaacactttgggaggccaaggcgggcagatcacgaggtcaggagttcgagaccagcctggccaacatggtgaaaccctgtctctactaaaaacacaaaaagctgggcgtggtggcgggtgcctgtaatatcagctactcgggaggctgaggcaggagaatcatttgaacctaggaagtggaggttgtagtgagctgagattgcaccattgcactccagcctggacaacagggtgaggctctgtctcaaaaaaaaagaaaaccttacaaaatatctgtcccccatgatcactacagtattattcataacagccaagatatggaaacaacccaagtgcccatccatgaataaatatgtgtgtatatagacatatacagagtgttcatgtgtacatatatataatggaatattatccaaccctaaaaagaagaaaatcctgctatttgcaacaacatggatgaacctggaagacattatgctaggtgaaataagacagacactaaaagacaattactgtatgacctcacaagtggaatctaaaaaagtccaattgatagtaacagggtagaacagttgttgccacaggctgctggggggtgaaaatggaaaatgttggttaaagggtacaaattttctgttataaaatgaagaagttctgaggaagctaatgtacaccatggtgactatactatattggacactttaacagtttggaaagtttttgaaaaatctaataaattatggggtaaaagttcaaaaaatgatggcacttaatattcagaaatgaatgagatcagctgattattggatgccaccaaatcttatttctggagttagcaactataggaaagaagcaattgaataaaatgtatctcaagcttccaaaataacaattaattaactgtaaagcaactacaaagaaaaaagtaaattcattacaaaaaaacaagactttcaatgcttctgcgaagacataccttgtaggcctagtgtggtggctcacatctgtaattccagtgcgttgagaggctgaggtggaaagactgcttgaggccaggaagtagaagctgcagtgagccgagatcatgccactgctctccagcctaggcggcagagagagaccatgtccccccccaaaacaaaacagaacaaagccaaaaaaaacaccaaagacatatcttgtagtgacagtcagtcatttcttgccccatttctcccctcctttatgctctactccatcattgggaagaagagagttaccacaaataactggatcaagtcactgccctctggctaaataggaattccaaatatcttttgatacaaatacatacaaaatgcacaaggcttatagaaaaaactttggtgattttcatcctcatgagtacaacttaaacatatttcaaatcagagtataaagccacaaatcaatatattacaaccaccatccatatccaatcaactgtcacgcatctggatggggtcctctcccgctttcttcacggctatgtgtttccctctctcattctgagcgtcttttttttctccttttctgttttgcacccctttctttattccctcttttatgtctgttctgcccaatgctctgcaacttacttcacctctcgtagctctttctccccaatctttccgattgtccccaatctccacgtatttctgcctcttttcccccatctaagctccctctctgctctccttgttaaattccctcttccctgttacatctcctttgttcccactctctagcacccccaatttcctaggcttactccctgctgtggttctccctctactctgcttgtcacccactgccctctctccctctctttcagtcccagcaccacgtagctctgtcagccgcggctccaactctttcaccttctccccactgtctgtctgtctgcagtgcctcctcctttgccgccccactctattttgctgcccttcatctctctgaaggtcccctttttttctaaatttctctgtgtgcttttctccccctgctactttttccatccgttctctttcactcttgctctctttgcaagtccctaaagtatcatccattttgccgtgtatttatgggtctccctcattcttttctcctcagtttttccttttgctccgtcgttccccgtcttttcctctcctgatccctctcacccacacattcgggaggaaaggggaggaataggatgcccacctcccggaagagcacattttccagtggagtaaaatttgggaaggaagaacactgggtgtcacaagacagactcaggtaacctgtcccaacggggagtcaagaaaagcagtggctgtgaaggggaagcctggggagcggaaggacccggcgtgaggacgacacgaggtggcgcggagaacgatgtctcacgacagggagggtctgcagaatcccaggacgtgggaggagaagcggctccttcaggagccggacagtgggcgctcccctccaggggcagacgacggaggagctcggggatcgcgaagggcgctagtccacatcccgaatgaggactcgacttggcgcggggcccaagcagagggttttaagcgggaacactacctgaatggggttgtctacatggtcctaaggaagaaaggcagagagcaaggaacggcctcagagagattttaaaccgaaagggaagcaattctcctacttacttgggacgaaggggctgttgcgggtattttaaggtccgtagcgatccccaggtcacgggtatggagaaccgaggactgcgaagtgcacgtttaatcaaggtagacgaagagaagcaaacgtttaatccaggtagactgaaacacactcatagcgacgtggcctttccccagcgcgatctgcttccgggtgtgcaggaaactgggcgcggaaagaaaaactgggcggcctgggggcggggcctaggcggggcgcgactaggaaagggctgggcggaaagactggcctgacttgggagtggcccgaaagggtggtgggaggcccagggcggtagggggcgtgactaggtggggcttggctggaccgaaaactgggatgaagcggggcctccaggggtgggcggggccgaggcggggcctgttctccactccgcctctcacccagcaggattttgttttccaggtttgggagtatttgtgactatttcttgtcctgtgaagcagcgttgctccttgcccattttaaattaatgtttcagaatttaaggttgaatcttaaagttgtggtccacttatactggaaactaagatgatttattcttaacaagttgaactgatttaagtcaaaaccgatttttccgagcctggtggactccatccagtcttaccagaaaagctgaagctactcagtagtcagggaactgggatctcggtggggattggatgtggagcagtgactggatccaggaacccagaagacattatgccaagcgaaatgtgctagacacagtgtagaaaatgaaataagtagaggttcctcttcaaagggactttcctcccagtctaattgagaatagatagtaacctctcttagaagcaaaatttactcaaagacctgtgctaatattcttaaatatctgctagccataatagataaatcaatatactctgtgttcttagctcccacattttagcctagatatttgccctggcatgcctgaattgttccaagcaagcattaggtcacagcctattcctcttccttatttggaagtgtttttgcctctctcagccttccacaagttacttcctctcttcctttgttctcctctgcctttgcctcttttgggaagttctaaggtgctagccaatcaggtcaagcacagaattgggtccgattccagccaatggaaaccagacacagcagtagggtggacgcgtcaggttattattattattattttttttgagacggagtctcgttctttcgcccaggccggagtgcagtggcgctatctcggctcactgcaagctctgcctcctgggttcacgccattctcctgcctcagcctcccgagtagctgggactagaggcacctgccactgcgcccagctaattttttgtatttttagtagagacggggtttcactgcgttagccaggatggtctcgatctcctgacctcgtgatccgcccacctcggcctcccaaagtgctgggattacaggcatgagccaccgcgcccggccagatgcgtcaggttataaatgacccttctcttttgttcatgtgtactctcgtggcaagactgctagtgagcagcaccctttctgcagaaagtaaactagccttgctgagagatcctttgtctcagtgttgatttttgcgacactgagcacccgttcccaacacacacaaagaaacatacttcatgcacttacttacacgtgctaagtacaaacatcaaattcagagtaacaaagtagaagggtggtttccagggctgagggtgtttcctatgcctgtcccaccattgtattttggaagcagataacttctctggcttcacagattcacagctgggcagaaactttgcctcaggatgaaccacaccttgtgtctcacccatatgtgattcagataatatttaggtgatatttgggccttagagttgatactgaaatggattaagacttttcagatgggccaggcaaggtagcttaggcctgtaaccccaacaattcaggaggccgagtctggcagattacttgagctcaggagttcaagaccagcctgggcacatagcaagaaccccgtctctacagaagatataaaaattagccatgcttagtggcacactcctgtagtcccagctacttgggcggctgaagtggcaggatcacttaaggccaaggatttgagaccagcctgggcaacatagtcagaccccatctctacaaaaaattaaattagccaggcatggtggcctgcatgtgtggtcccagctattgggaggctgaggcaggaggatcacttgagcccaggaggtcgagactgtgacaagtcatgattacgccactgcactccagcctgggtgacagagagagaccccatctcaaataaataaataaaagatttttgttctgatgggagtgaagggatcttgcatgtaagaaggacataaagtttaggagtccagaacacagtgtgttatgagcagaaaaatttccacacacaaaaaaaaccctatcttgaagtcctaatacccagtacctcagaatataactgtatttggatatatggcatctacaggagtgatcaagtaaaaataagcttgttaaagtgggttctgatccaatctggctgatttctttataagaagaggagattcagctgggcaaactggcttgcccctgtaatctccacattttaggaggccgaggtgggcagttccagcccagcctgggcaacatggtgagaccctgtttctactaaaaatacaaaaattacctggcaatggtgacccacacctgtactcccagctactgaggaggctgaggtgggagatttgcttgagcctgggaggcagaggttgcagtgagccaagatcacaccactgcactccagcctggaagtcagagtgagactcttgtctcaataaataaacaaatacataaatgaaagataacgccaaggaagcagggagctaacttgccttcttctgttaggtgtttgatgaaaaattgaagcagaaagtttatgagctatgtatgttatctgcgcagaagggctatatggcctaagccagaaagaaaaacagacctacagcttatctgcttcctgtattttgtttatatgtcctggaccatgaagaaaggcagttttttaaaattttgttttgttttgtttttttgaggcagagtctccctctgtcacccaggctggaatgcagtggcatgatctcagctcactgcaaccttcgcctcctgggttcaagcaattctcgagcctcaggctccagagtagcagggactacaagcacccacgaccacgcccaactaatttttttcttttttttgtattttcgtagagacagggtttcaccatgttgcccagggtggtctggagctcctgagctcaggcaatttgaccgccttggcatcccagagtgctaggattacaggcgtgagccaccgcacctggcctagaaaggcagatttatagcttatttgctttatctctttgctttcccctggtcctgccaggctgactccttttctctaattaggtctccacagactataccataaaagtgcatttttctcaccctcctataaaatccctggactcctagttttactacaaataaaccaggattctatttcccagtatgaaaagtttgtcagaaaaaaagaggtagcacgggaccttctttcttttcttcaaaactaattcacctcctcttcttctctttcctgtctctctcttcctagactggcctgcgcagttctagatccccagtgaatccttgggttgacatacaagggacgaagaacctataggaaagggaaatctctagctctcagaggtggctttttggatgtctggatgcattcataaccatcctcgtgttgccagaaaggggtcctgatccagatcctgaaaccgccattgcaaattataactgagaattattacagtgaaagggatccgacctaaccaactccatcttgcttttaacctccaagctgcctttgtccactcctgggtgtaggccaaactagctttgggaggaacttagtttatcttttaaaataagggcattaatagccctttcccaaaacaaatgccctttctgcttgggactagactgcctttataggattaacaagttagtcacaagattagaaactatagtttaggagtcatgcagctagaggctacaagattgtcacctttcccaaattgttcctgggaataacatcagtattttaaaacctaagatcagtgtttgagaaattttgcagtccctgcacttgatggatcacctgacacccagatcaataaactgactcatctggtcttgtgacaccacccaggaactgactcagtgcaaaaggacagtgtcaactctctgatttcatctctgaacaaccagtcatcactctggactcactggcccctacccatcaaattatccttaaaaaccctgatccccaagatttcagggagactcatttgagtaataataaaacttcagtctcctgtacagccagctccacatgaattaaactctttctctattacaatttccctgtcttgaggaattggctctgtctaggcagcagaaaaagagaacctattaggcagttaaacccagaagaaggggttcttggatcttgtgcaagaaagaattaggggggagtccagagagtaaagtgacagcaagttttttaagaaagtaaaggaataaggcagggtgcactggctcacacctgtaatcccagcactttgggaggctgaggtgtgaaaattgcttgaacccaggagtttgagacaagcctgggcaacatggcaaaaccccatctctacaaaaaaaaaaaaaaattagccaagggtggtggcatgcacctgtagtctctgctactcgggaggctgaggtgggaagattgctcaagcctgggaggtggaggttgcagtgacctgagatcacaccactgcactattgcttgggcaacacaaccactctctctcaaaaaaaaaaaaaaaaaaaaaacatatatattagatagatagattcagacagtttttatttcaacactgaatgtttacttttgaaactcctgacgtttaagttgataaaaactcaattttccccatgctaaaaactttatacatgtcctttcttcatgcatacatagaacccttcacacaatataattgttggaagtgtttctgaaatactgtttagacaaattacctatatttttacacctgtactataaaattaatatctaacagacaataaatattaaattatttaatagaagaattatttttcaaaggctaatgatttcacagctgtagcaaaacttttttctttttttttttgagatgaggtctcactctgttgcccaggctgcagtgcagcgatgtaatcacaccccacagcagcctccacctccccaggctcaggcaataccccaacctcagtttttgtatttttagtagagatggggtttcaccatgttgcccaaactagtctaaaactcctaggttcaagcgatctccccacccccacattctaaagtgctggcattgcaggcgtgaaccactgtgcctggccaaaatgtaattttaaaaataatttttaaaatcattatacaatttcctagaaacgatttaatccaatttaaagatttacatttctttccttgtacttcagtgaaaaacttataggattagtaaatcaaggtggtattttcagatttgtatggcaaaaaaatatgcggagacctgacagatgtaaaggatgtattctatcaatatatggagggtcccttacattttaagttcagtgaaagaactggaatgatacaagataatgaactaaaattgtataatgtaaaagcaagagctctgttgctaatgtacagctgtatcagttggatttttaaaaacccaacatactaatttggcagggtgcggtggctcatacctgtaatcccaacactttgcgaggccaaggtggatggatcacttgaagtcaggatttcgagaccagcctgatcaacatggtgaaaccccatctctacaaaaaaatacaaaaattagctggatttggtggcatgcacctgtagtcccagctacttgggaagctgaggtaggagaattacctgagcccaggaggtggaggttgcagtgtgctgagactgtgccactgcactccaacctgggtgacaaagcaagatcctgtctcaaaatattataacatgtgacagtgcagcttccagcagaaataatctgttcctcttttgctcacaccaaatattcacccccacttctaaaaaatataaaagaataagccaaaatgtaacttcaagtcacaagcaaggatctcatgacagtctcatgagacttcttttcattgagagcccagtagagttctcctcactcacaacacttcattgtggaacagaaaaatgaaacctgaataaaccctcccatccagaaaaggaaaataaagaaggtaccccgtagtttctgtttcacagcaaatgtgcaatgttgctgagaagatgagtcagggactgattccacaaggtcaagaatgaacaacagtccttttcatggctacagttctcctgagaatgtttccagtccattgtgatttgttgttcttgacttcacctgatgacatccctaatacagtatcagaaagtatgccttccttgtgcagtaagcacctttctccagctacttctatttatttatttatttatttatttatttatttatttatttatttatttttaagacaggctctgttgcccaggctggagtgcagtggcactatctcggctcactgcaaccttcacctcccagattcaagtgatcctcctgcctcagcctccagagtacccagctacttcattcccacaaaaatttaccatccaaaggattattataaatctatatttagttttgtttttagaaaatactatggactggtagaagtctcaaaatacaacacgactaaaaatacagaaattagccaggcatgacagtgtgcatctgtaatcccagctactctgaaggctgaggcaggagaatcacttgagcccaggagatggaggttgcagtgagctaagattcagctattgcactccagcctgagccacagagagagactctgtctcaaaaataaataaataaatatttttggtaggaaagcttaaagaaaaataattctatatgagaaagaatcttgtatcagaaattttgtcctggaataaaatgactgattgtataagaaagatgaatgttcaggaaaaacaagaaatcccacacatgtcatgaatggtctgtgtaagtcataataagattgatgaaaaaaagttttatgtgatcaaattcactataattaaagggaaattataatggtctttctagagattgggttttgattttaaaaaacaccacttatacactaaagaattggttcaaactacaaaattttgttaagcggtgctttaaataaattatgaaacataatttattcaatgtaaagttcaagttttatggaatctcactgttttcagctttctctcccctcttaaaaggcctgaaatcataactttttcacctaattttcagctcctgtagcctttttttctttgggttctaactgttgtggcctgacactataaaatgttttatttttgaggtctaaaggaaatgtttctttccaaacataatatctcccatagggaacagcagtcacactgtagaagggcttttcttttgcctttggaaaactggcctactaaacagatctcacactttatcaaagtaattcctgtgtcagtattactaagtttggtttggttacaaggaaatttaaattaaatttttttaaattaagtttattatgtccatataactttccgtatatgcttttaggtccctgttccattcagttaaagggctttgactcctgggtctaaaaaggacaccaagtcttgctaaatcttaaacactgacagcagttcaagcctcatcttcagacccagtagaagttcctaatcaaaataaactgtgtttgtgaaacacagggcaagaaattaaaactattcaactcctcaagtaccagtggttatactgaaagaagtggacatgtgagattgtcagggtcaatttttagagctgaaataagtttggtttctctagaaattaactatcaatttcaaaggcaaattgttgcaagaccagcatatgagcccctgcgtcagattaacaaggttgtcttggagcattagcccaccttttttttattctggagatggagtctcactctgttgccgaggctggagtgcaatagtgcgatctgggctcactgcaacctccacctcatgggttcaagtgattctcctgcctcagcctcccaagtagctggggtaacagacatgtgccatgatgcccagctaattttgtatttttagcagagatggggatttaccacgttggttaggctggtctcaaactcctgacctcaggtgattcacccacctcggcatcccaaagtgctgggattacaggcatgagccaccgtgcccagcctagcccactatttaataaagattatatagtgtataaaaaggctcatggaaattatacttacaggcaagatgattaaaattttatagtttgtttataaaatattgaaaaaccaatttaattggccttgtgccatttttactagggaatattgtttgggaaattaagtcttttctctcaaaaaataaaggttgccacctttttttgaaatctttgcgataccactttggttaaatgaatcacttattttataatggcctgtgatcctattttatgatatcaagtgttttaaactttttatatttgacaagctttccaaagtcacattttaacttgcgtcgtcattaaacttttgttaatcccct
